United States Patent Application Publication US 2024/0131193 A1 - sequence listing, part 16

SEQ ID NO: 30398 - DNA, 1419 bp, synthetic construct
  source 1..1419: mol_type = other DNA; note = Synthetic coding sequence
gtgacacactacaaacagtatcctcccaatacatctaaggtgtacagctacttcgaatgcagggaaaagaagaccgagaattcaaagttaagaaaggtgaagtacgaggagaccgtcttctacggccttcagtatatattaaacaaatacctcaaggggaaggtggtcacaaaggaaaaaatccaggaggcaaaagacgtctataaggagcactttcaggatgacgtggttaatgagaaaggctggaactacatcctggaaaaatacgacggacacctccctatcgagatcaaagctgttcccgagggttttgtgattcccagagggaatgttctttttaccgttgagaacacggaccctgaatgctattggctcacgaactggatcgagaccattttagtgcagagctggtacccaatcaccgttgccaccaattctcgcgaacaaaaaaaaatcctggccaagtatctgctggagacttctggcaatctagacggactggagtacaagctgcacgattttggataccggggagtgtcgagccaggaaaccgccggtatcggcgcttcagcccacctggtcaattttaagggtacagacacggtcgctggcctcgctctcaacaagaaatattacggcaccaaggaccctgttcctggatatagcgtgcccgctgcagaacactcaactattactgcgtggggtaaagatcatgaaaaagatgccttcgagcacattgtaactcagttcagcagcgttcccgtctcagtcgtgtcgaattcctacgacatctacaatgcttgtgagaagatatggggagaggacctgcgccatctgatcgtgtcccgaagtacgcaagccccactgattatcaggcccgactccgggaatcccctggacacggtgctcaaggttctagagattctaggtaagaaatttccggtgacagaaaacagcaaaggctataagctacttccaccgtatttgagagtcatacagggcgacggtgtggacattaacacccttcaggagatcgtcgaaggaatgaagcaaaagatgtggtccatcgaaaatattgcattcggctccggtggcggactccttcagaaacttactagagacttgctcaactgcagttttaaatgcagttatgtagtgaccaatgggctgggcattaatgtcttcaaggaccccgtggcggatccaaataaacgcagcaagaagggtaggttgtccctccatcggaccccggctgggaattttgtgactctggaagaaggaaaaggagacctggaagagtatgggcaagatctgttacacaccgtttttaaaaacggtaaagtaactaagagctatagttttgatgagatccgcaagaacgctcagttgaatatcgagctggaggcagcgcaccattag

SEQ ID NO: 30399 - DNA, 519 bp, synthetic construct
  source 1..519: mol_type = other DNA; note = Synthetic coding sequence
tgcaagcaatccacgaagaccgaggaaaagcttagaccaactcggacctcatctgaatctatatatagcagacccggtagctccatccccggaagtccagggcacactatttatgcgaaagtggataatgagatactggattataaggacctggcagccatccctaaggtaaaggccatatacgacatcgagcggcctgatctgatcacctatgagcccttttatacctccggctacgatgataagcaagaacgccagtctcttggagaaagtccgagaactctttccccaactccaagtgcagaaggctaccaggacgtgcgggataggatgatccaccggtcaacatctcaggggtctattaattcacccgtctactcacgccatagttatacacctacaacatcaagatcccctcagcactttcatagacccgatcagggaattaacatatacagaaagcctcccatatacaaacagcacgtgctattcgaagtgatcctgctcttgctaatttag

SEQ ID NO: 30400 - DNA, 2445 bp, synthetic construct
  source 1..2445: mol_type = other DNA; note = Synthetic coding sequence
atgagactgctggatggcaagcagacgagccgctacagcgagaatgcttgcgagaagaaaatcttcagcatatacggacattacccggttgtcagggctgccctgcggagaaaaggttgggtggaaaagaagttccattttctcccaaaggtgattcccgacgtggaggacgaaggcgcacgggtcaacgacgatacatgtgccaaagtaaaggagaatcaggaaatggccctcgaaaagactgataatatacatgacgtgatgagcaggcttgtgaaaaatgagatgccctacctcctgtggacaatcaagcgcgatatcatcgactatcactccttgacctacgatcagatgttaaatcactacgccaagactgcctcttttaccaccaagatcgggctctgtgttaacatgcggagccttccttggtacgtccctgccaaccccgattccttctttcccagatgctatagcctgtgtacagaatctgaacaacaggagttcctggaggacttccgtaggacgatggcctcatctatcctgaaatgggttgtgtctcatcagtcatgttctcgatcctctcgtagcaaaccacgagaccagcgcgaagaagcaggctcgtcagatttaagctctaggcaggatgctgaaaacgcggaagcgaaactgaggggtttacccggacagctggtagacatagcttgcaaggtgtgtcaggcgtatctagggcagctggagcatgaggacattgatacatcagccgacgcagtggaagaccttacggaggccgaatgggaggacctaacacaacagtactacagcttggtgcacggcgacgctttcatcagtaatagtcgcaactatttttcacaatgccaagctctcctaaaccggattacaagcgtgaatcctcaaaccgatattgacggtctgcggaatatttggatcatcaagcccgcagcgaagagccgtggacgggacatagtgtgtatggatcgggtagaagagatcctggaactggcagctgcggatcacccactctcaagagataacaagtgggtcgttcagaagtatattgagactccactcctcatttgcgatactaagttcgatatccgtcaatggtttctggtgacagactggaaccccctaacaatctggttctacaaggagtcctacttgcgcttcagtacgcagcgtttcagcctggataagctggacagcgccatacacctctgtaacaacgccgttcaaaaatatctcaaaaatgatgtcggcaggtccccgttgctcccggctcacaatatgtggacgtctactcggttccaggagtacctgcaacggcagggacgcggagccgtgtgggggtccgtcatctatccctctatgaaaaaggctatagcccatgcaatgaaggtggcgcaggaccatgttgagccaaggaagaattcctttgaactgtatggagcagactttgtgctaggaagagacttcagaccatggctcattgagatcaatagcagtccaacaatgcatccttccactcctgtcacggctcagctctgtgcccaggttcaggaggacaccataaaggtggcggtggacaggtcctgcgacatcggaaatttcgaattattatggagacagccagttgtggagcctccacccttcagcgggtccgatttgtgcgtggctggggtttccgtgaggcgagcacgcagacaggttcttccggtatgcaacctcaaagcatcagctagcctactcgatgcccaacccctgaaagcacggggaccctccgcaatgcccgatcccgctcagggacctccatcccctgctttacaaagagatcttgggttgaaagaggaaaagggactcccactcgcactgctggcacccttgagaggagccgcagaatctggcggagctgcccagccaacaagaactaaagctgctggcaaggtggaactgccagcctgtccatgccgccatgtcgactctcaagctcccaataccggtgttcctgttgcccagcccgctaaaagctgggatcctaatcagcttaatgcccatccgctggaacctgtcttacgcggactcaaaactgcggagggagccctgcgaccccctcccggagggaagggagagggaaccgtgtgctcgaggctgccccatcacgggcaccacgttgctgcctgccagacgacaggcaccacctgggatggagggccaggcgtgtgtttcctccgccaactcttggcatctgaactacccatgggacctgggttaccaagggatccaagggcgcctccatgtctcgtttgccgcggtttgctacctcccgcaggcccttgcaagcgctgtcgaagtttttgcgctgcagttttgcagggggcttctttcgttaggttgggtggacggagttgctcaccacggacgccctag

SEQ ID NO: 30401 - DNA, 318 bp, synthetic construct
  source 1..318: mol_type = other DNA; note = Synthetic coding sequence
atggataaaaacatcggtgaacagttaaacaaagcttacgaagccttccgtcaagcttgcatggatcgcgacagtgccgtgaaggaactacaacagaagactgaaaactatgagcagaggataagggagcagcaagaacagctctcactgcagcaaaccatcatagataaactgaaaagtcaactcctcctggtgaacagtacccaggataataattatggttgcgtgccccttctcgaggattctgagacacgcaaaaataatctgacactggaccaaccacaggacaaggtgatttccggcattgcccgagagtag

SEQ ID NO: 30402 - DNA, 816 bp, synthetic construct
  source 1..816: mol_type = other DNA; note = Synthetic coding sequence
atggcgcctgtgggggtcgagaagaagcttcttttggggccaaacggccctgccgtggctgccgcaggtgatctgacctctgaagaggaggagggccagtccctgtggagcagcatactctcagaagtcagcactagggccaggagcaaattgcctagcggtaaaaacattctggtgttcgatcacacccggtgtaatgtgtggatcctggatggagacctgtatcacaaggggcttttaaaattcgcagtgtctgcagagtctctgccagaaactctggtgatctttgtggcagatatgtcccggccttggactgtgatggaaagtctccagaagtgggcctcagtactccgggagcatattgacaaaatgaaaatcccacccgagaagatgagggaactggagcgtaagttcgtgaaagatttccaggactatatggagcctgaagaggggtgtcaaggctcaccccagcgccgagggcctctgactagtggaagcgatgaagaaaatgtagcccttcctctgggtgacaacgtcctcactcacaacctagggatacccgttctagtcgtgtgtactaaatgtgacgcagtatccgtcctggagaaggaacacgattacagggacgagcatctagacttcattcagtcacacttaaggcggttctgcctgcaatatggtgccgctttgatctatacctcggtaaaggaggaaaaaaatctggatctgctgtacaaatatattgtgcataagacttacggctttcattttactacacccgctttggtggtcgaaaaggacgcagtatttatgtag

SEQ ID NO: 30403 - DNA, 522 bp, synthetic construct
  source 1..522: mol_type = other DNA; note = Synthetic coding sequence
atggcggatcgcatgcagattgtcgttattctgtcagagttttttaatactacttggcaggaagctaattgcgcgaactgcctgacaaataatagtgaggagttgtcaaacagcacagtatatttcctgaatcttttcaatcacaccctaacatgctttgaacataatcttcagggcaatgcccactcactgctgcaaacaaaaaactactcagaagtctgcaaaaattgccgggaggcttacaagacactgtcctccctttattccgagatgcagaagatgaatgagctcgagaacaaagcagaacccggtactcacctctgcatcgacgtcgaagatgccatgaacattacaaggaagctgtggagccgcactttcaactgttccgtcccttgctccgacacagtgcccgttatagccgtcagcgtgttcatcctcttcttaccagttgtgttttatctgtcttccttcttacatagcgagcaaaaaaaacgaaagctgatcctgcccaagcgcctttag

SEQ ID NO: 30404 - DNA, 435 bp, synthetic construct
  source 1..435: mol_type = other DNA; note = Synthetic coding sequence
taattcattcactgtacggacgactctccagacccctgcatcgagtatgagctcgtgctgcggaagtggtgtgagctcatccccggtgccgagttccggtgcttcgttaaggagaacaagctcatagggatcagccaacgagattacacacagtattacgatcatatttcgaaacagaaagaagaaatacggcgatgcatccaggactttttcaaaaagcacatacagtataagtttttagatgaggacttcgtgtttgacatctaccgggacagtagaggtaaagtgtggctcatcgactttaaccctttcggcgaagtaacagactctcttttatttacctgggaagagctgatttctgagaataatctgaatggagactttagcgaggtggacgcccaagaacagaagcgtaatcagcaggaggatgactag

SEQ ID NO: 30405 - DNA, 978 bp, synthetic construct
  source 1..978: mol_type = other DNA; note = Synthetic coding sequence
tagattcagggtgaggcgtcccgcagagccgctggtgagcccgaggctggctccgattacgtcaaatttagcaaagaaaaatatatcctcgacagctcccctgagaagctccataaagaattggaagaagagctgaagctctccagcaccgacctccggagtcacgcttggtaccatggacggatacctagagaagtgtctgagaccttggtacagagaaatggcgacttcctgatcagagattctttgacgtcgctgggagattacgtccttacctgtagatggaggaatcaggcacttcacttcaaaatcaataaggtggtagtgaaagcgggagagagctacacccacatccagtacctcttcgagcaggagagttttgatcatgttccggcattggttagataccacgttgggtctaggaaggcagtgtctgagcagtccggggcaatcatctactgccctgtcaaccggacattcccactcaggtatctggaggccagctacgggctcggccaaggcagctctaagcccgcaagcccagtttcaccaagcggacccaagggtagccacatgaaaaggcggtcagtgactatgacagacggcctcactgctgataaagtgactcgtagcgatggttgccccacgagtacttccttgccccgtccaagagattctatcaggtcctgcgccctctcgatggaccagatccctgacttgcatagccccatgtcgcccatttctgaatctccctcttctcctgcctattcgacagtgactagagtccacgcagcaccagcagccccttctgctaccgccctgcctgctagtccagtggcccgtcgctcaagcgagccacagctgtgcccaggttctgcccctaagacacacggagagtctgataaggggccacacaccagtcccagccatacactgggcaaggcctctccttcaccgagtctatcatcatactcatag

SEQ ID NO: 30406 - DNA, 330 bp, synthetic construct
  source 1..330: mol_type = other DNA; note = Synthetic coding sequence
atgtctagtaaggggtcttcgaccgacggccgaacggacctggccaatgggagcctctcctctagtccagaggagatgtcaggcgctgaggaaggcagggagacgtcttctggtatcgaggttgaggcttctgacctttcattgagcctgacgggagacgacggcggacccaaccgcacgagcacggaaagcaggggcaccgataccgagagtagtggtgaggataaagattctgatagcatggaggacaccggacactacagcattaacgacgaaaatagggtacacgaccgatcagaagaggaagaagaagaggaggaagaggaatag

SEQ ID NO: 30407 - DNA, 1638 bp, synthetic construct
  source 1..1638: mol_type = other DNA; note = Synthetic coding sequence
gccgctggagcacctaggcttcttgggccaggcgctgttcggggacctgctggcgtggggcgagtggctgctggagccatggagggggtgctgtataagtggaccaattacttatctggctggcagcccagatggtttctgctttgcggcggaattctctcctactatgatagccccgaggacgcctggaaagggtgcaagggctcaatccagatggccgtttgcgagatccaggttcactcagttgacaacacacggatggacctgattatccctggggaacagtatttctatttaaaggccaggagcgtggcagaaagacaacgatggcttgtcgctctggggagcgccaaagcctgtctgaccgacagcagaacccaaaaggaaaaagagtttgccgaaaacaccgagaacctcaagaccaaaatgtctgaacttagactctactgcgacttactggttcagcaggtcgacaagactaaagaggtaactaccaccggagtgtcgaactctgaggagggcatagacgtgggtacccttttgaaaagtacgtgcaacacctttctcaaaacattggaggaatgcatgcagattgcaaacgcagcttttacctctgagctgctgtataggacccctccagggtcccctcaacttgccatgctcaagagctcgaagatgaaacaccctattatcccaattcacaatagcttagaacgccagatggaattaagcacctgcgaaaatggttctttgaacatggaaatcaacggtgaggaggagattctgatgaagaataaaaatagcctctacctcaagtcagccgaaatcgattgttcaatttcctctgaggaaaatacggacgacaacatcactgtccagggcgagatccgaaaggaagatgggatggagaacttaaagaaccacgacaataacctgactcaatccggatctgactccagctgctcgccagagtgcttgtgggaagaaggcaaagaagttatccccacctttttctccactatgaatacttctttttcagatattgaactgctggaggatagcggtataccaactgaagccttcttggcatcttgctatgctgtggttcctgtgttagacaaactcgggccaacggtgtttgcacctgtgaaaatggacctggtcggaaacattaagaaagtgaatcagaagtacattactaacaaggaggagtttactaccctgcagaagatcgtcctgcacgaggtcgaggctgacgtagcgcaggtgcggaatagcgccaccgaggcactcctgtggttgaaaaggggactcaagtttctgaagggctttttgaccgaggttaagaatggcgaaaaggatatccagacagccttaaacaacgcatacggcaaaacacttaggcagcaccacggttgggtagtccggggagttttcgctctcgccctacgggcagccccatcctatgaggattttgtcgccgcactgacagtcaaagaaggcgaccaccagaaagaagctttcagcataggcatgcaaagggatttgagcctgtacctgccagcgatggagaagcagctggccatcctggacacgttatacgaagtacatggcttagagtctgacgaggtggtttag

SEQ ID NO: 30408 - DNA, 522 bp, synthetic construct
  source 1..522: mol_type = other DNA; note = Synthetic coding sequence
atgtataccctgctgtcaggactttataagtacatgtttcagaaagatgaatattgcatcctcatcctgggcctggacaatgctggaaagacgacatttctggaacagtccaaaactcggtttaataagaattataaagggatgtccttatccaaaatcaccaccaccgttgggcttaacatagggacagtcgacgtaggaaaggcaagactgatgttttgggatctgggcggacaagaggaactgcagtctctgtgggataagtactatgcagaatgccacggcgttatatacgtgatcgacagcaccgacgaggagcgactcgcagaaagcaagcaggcctttgagaaagtcgtcacctctgaagcactctgtggcgtgccagtcctcgtcctcgctaataagcaggatgtggagacatgcctgtccatacccgatattaaaaccgccttttctgactgcacttccaaaattggccgtagggattgcctcactcaggcttgttctgccctgaccggctag

SEQ ID NO: 30409 - DNA, 729 bp, synthetic construct
  source 1..729: mol_type = other DNA; note = Synthetic coding sequence
atgggactcgtgtgtgtgctcggtgacggtaaaaccgagcagaagggtggggacaaaaagcgcggagttaagaggccaagggaggaccatggcagaggatatttcgaatacattgaagagaataagtatagccgcgctaagagtccacagccacctgtcgaggaggaggatgagcatttcgacgacacagttgtctgcttggatacttataattgcgatctccacttcaaaattagtagggaccgcctatccgcctcgtctctcacaatggagtcattcgccttcctctgggctggagggagagctagctacggcgtttcaaagggcaaggtgtgttttgagatgaaagtcaccgaaaagattcccgtaaggcacctgtatacgaaggatatcgacatccacgaggttcgcatcgggtggtccctcaccactagcgggatgcttctaggtgaggaggaattctcttacggatactcactgaagggtataaaaacatgcaactgcgagaccgaggattatggggagaagttcgacgaaaatgacgtgatcacatgttttgcgaacttcgagtcggacgaagtggaattgagctatgccaagaatggccaggacttgggagtggcatttaaaatcagcaaggaggtgctggccggtcggcctctcttccctcatgtgctgtgtcacaattgcgccgtcgagtttaacttcggacaaaaggagaagccctag

SEQ ID NO: 30410 - DNA, 2922 bp, synthetic construct
  source 1..2922: mol_type = other DNA; note = Synthetic coding sequence
tcaagtagtgataaggagtccattctcacgattctaaaagtgcttggcgatcttttgtcagtggggactgatcgcaggatccattatatgatatctaaagggggttctgaagccctcctgcagacgctggttgacaccgcaaggacagcaccacctgactatgatattctgctgcccctgttcagactgctggccaaggtagggcttcgcgataagaagatcggtcggaaggccctcgagcttgaagctctggatgtcaccctaatcctggcaagaaaaaacctgagtcacggacaaaacctactacattgtctctgggccctccgggttttcgctagctcggtatctatgggcgctatgctaggtattaacggagctatggagctcttgtttaaggttataactccatataccagaaagagaacacaggcaatccgggcagccaccgaagtgctggcagccttgcttaagtccaagagcaacggcagacgagctgtgaaccgcggatatgtgacctcgcttctgggcctgcaccaggattggcatagtcacgataccgctaacgcttacgtccagatacgaaggggcctgttgctctgcttacgtcacatagcagcgttgcggtcggggcgagaggcttttctggccgctcagggcatggaaatcctattctctacgacccagaactgccttgacgacaagtcgatggagcctgtaatctccgtggtactgcagattcttcgccagtgttaccctaccagccccctgccactagtgacagccagttccgcgtatgcttttccagtgccaggttgcatcaccactgagccaccacacgatttgccggaggaggacttcgaggatgacggggacgacgaggttgataaggatagcgacacagaagatggcaaggtagaagacgatgacttggagaccgacgtaaataaactaagtagtaagccaggccttgataggcctgaggaagagttaatgcaatacgaggtgatgtgcctggagctgtcgtattcatttgaagagcttcagtcgaagctgggggacgacctcaactctgaaaagacccagtacgcaaaccatcatcatattcctgccgctgcctctagcaagcagcactgttactccaaagatcagtctagctgtggccaggagcgcgaatatgccgtacagacaagccttctgtgcagagtgaagacagggagatcaactgtgcatctcggatcaaagaagaacccaggcgtgaatctttaccagaacgtgcagagcaattcactgcggcgagacagctcggaaagcgaaatacctgatatccaggccagccctaaggcagatgcttgggatgtagacgccattttctgtccgcgtatgtctgcctccttctccaattccacccgaacacgtgaggtggtaaaggtcattgataaactgctacagactcacctgaagcgagtgccttttcacgacccttacctgtacatggctaaagccaggagaaccagttcggtggttgactttaagatgatggcattccctgacgtgtgggggcactgccctccgcctaccacccagcccatgctggagcgcaaatgtggtgtccagcgtatccgcatcttcgaggacatccggcgattgatccagccttctgacgttatcaataaggtggtgtttagcctcgatgagccatggcctttgcaggataatgcctctaactgtctgcgcttcttctcgaaattcgagtccgggaatctccgcaaggctattcaggtacgggagttcgaatacgatttgttagtgaacgcagatgtaaatagcacacagcaccaacagtggttctactttaaggtgagcggcatgcaggctgcgatcccctaccacttcaacattatcaattgtgagaaaccaaacagccagttcaactatggtatgcagcctactctgtatagcgtgaaggaagcgttgctcggaaagccaacgtggatccgtacggggcatgaaatctgctattataaaaatcactaccggcaatctactgccgtggcgggaggggcttccgggaagtgctattacactctgacattcgctgtgaccttcccacacagcgaggacgtgtgttatttagcctaccattacccttatacctacactgctctgatgacacacctggacatcctagagaaaagtgtgaatttgaaagaggtgtatttccgtcaggacgtcctgtgtcagaccctggggggtaacccgtgtcccctggttaccatcacggcaatgcctgagagtaactccgacgaacatttggagcagtttaggcaccgaccttatcaggtaatcacagcccgtgtgcaccctggtgagtctaacgcctcctgggtcatgaagggaaccttagagtttctggtctcatctgaccccgtggccagattactgcgcgagaattttatctttaagattattcccatgctcaaccctgacggtgtcatcaacggcaatcacaggtgttccctgtctggtgaggatctcaatcgccagtggctgagtccaagtgcacatttacagcccactatctaccacgccaaaggactgctgtaccacctgagttcaatcgggagatcccccgtcgttagtcacttcctccttgtcttctgcgattttcacggccatagtcagaaaaaaaatgtgtttctatacgggtgtagtatcaaggaaacactctggcaggcggcttgcactgtgggaaccagcaccattctggaggaggtcaactatcgcactctgccaaaaatcctcgacaaattggcaccggctttcaccatgtcttcctgcagtttcctggtagaaaagagccgtgcatccaccgccagggttgtagtgtggagggaaatgggggttagccggtcatacacatag

SEQ ID NO: 30411 - DNA, 7751 bp, synthetic construct
  source 1..7751: mol_type = other DNA; note = Synthetic coding sequence
tagtcaagcataaccttctctgtgaaggttgagggtcgtcctgtgccaactgttcactggctacgggaggaagctgagcggggtgtgctatggattggccctgacacacctgggtacacggtggcttcatctgcccagcaacatagcttagtgcttctggacgtcgggaggcaacaccagggaacttatacatgcatagcatccaatgctgccggtcaggccctttgctccgccagtctgcacgtctccggcctccctaaagtcgaggagcaggagaaggtcaaagaagcacttatctccaccttcctccaggggactacccaggccatctctgcacagggcttagagacagcctcgtttgccgaccttggtggccagcggaaagaggaaccactcgctgccaaggaggccttgggacacctctctctggcagaagtcggcaccgaggaattcctgcagaaactgacatctcaaatcactgagatggtgtccgctaagatcacccaagcgaaattgcaggtccctggaggggacagcgacgaggatagtaagacgccaagcgcttcgcccaggcatggcagatcccgcccttccagcagcatacaggagtctagcagcgaatctgaggacggtgacgcccgaggtgaaatcttcgacatttatgttgtgaccgccgattatttgcccctgggggctgagcaagatgctatcacgcttcgggagggccagtatgttgaggtgctagatgccgcacacccgctcagatggctggtgaggacaaaacctactaaatctagcccttccagacaggggtgggtgtcacccgcatatctggacaggagactgaagttgtcccccgaatggggcgctgccgaggcccctgaattccccggagaggcggtgagcgaggacgagtacaaggcgagactctcttcagtgattcaggagctgcttagttcggagcaagctttcgtcgaagagttgcagttcctgcaatcacaccacctgcaacatttggagaggtgtcctcacgtacctatagctgtggctggacagaaggcagtgatatttcgaaatgtcagagatatagggaggtttcactcgagctcttttttgcaagaacttcagcagtgtgatacagatgacgatgtcgctatgtgcttcattaaaaaccaggctgcgttcgagcaatatctcgagttcttggttggaagagtgcaggcagaaagcgtggtggtttccaccgcaatacaggagttttacaagaagtatgccgaagaagctttgctggcgggagatccctcacagccgccaccgcctcctctgcagcattacctagagcagcctgtggagcgtgtgcagagataccaggcactgctcaaggaactgatccgcaacaaggctagaaacagacagaactgcgctctgttagagcaggcttacgcagtggtcagtgcgctgcctcagcgcgctgagaataagctgcatgtatccttgatggagaattacccaggtaccctccaggccctgggggagcctatcaggcagggccactttattgtctgggagggcgctcccggtgcacggatgccatggaaaggtcacaaccgtcacgtcttcctgtttcggaaccatttggtcatctgtaaaccgagaagggattcgcggaccgatactgtgtcctacgtgtttcggaatatgatgaaactgtccagtatagatctaaatgaccaggtggaaggcgatgatagagcctttgaggtctggcaggaacgggaagacagcgtccgaaaatacctgctccaagctagaacggcgattattaaaagcagctgggtgaaggaaatatgcggtatccagcagcgacttgcgttgccggtgtggcggccacccgacttcgaggaggagctagccgactgtactgcagagctaggggagacagtcaagctggcctgcagggttactgggaccccgaaacccgtaatcagttggtacaaagatgggaaggccgttcaggtcgatccacatcacatcttgatcgaggatccagatggatcttgcgcacttattctggattccctaaccggcgtagactccgggcaatatatgtgttttgccgctagtgccgcaggtaactgtagcactctcggtaaaatccttgtgcaagtgcccccacgattcgtaaacaaagtgcgcgcatccccttttgtcgaaggggaggacgcccagttcacatgcactatcgaaggcgcaccatatccgcagatccggtggtataaggacggtgctctcctcactacgggaaataagttccagactctgtctgaacctagaagcggactccttgtgttggtcatacgtgctgcaagtaaggaggatctgggactgtacgagtgcgagctggtcaaccggcttgggagcgctcgcgcttccgcggagctacggatccagtcacctatgctgcaggcccaagagcaatgtcacagagagcaactggttgcagccgtggaggataccacactggagcgggctgaccaggaagtaacatcagtcctgaaaagactgctcggaccgaaggcccctggcccatccactggggatctgacaggtccaggcccatgtccaagaggagcacctgccctgcaggaaacaggaagtcaaccgcctgtgactggtaccagtgaggctcctgccgtgccaccacgcgtcccccagccactactccacgaggggccagaacaggagccagaggcgatcgctagggcacaggaatggacagttcctatacgaatggaaggagccgcttggcccggtgccggaaccggagaactgctgtgggatgtccactctcacgtggtaagagagactacacaacgcacatacacttaccaagccatagatacacacacagctcggccaccaagcatgcaggttaccatcgaagatgtgcaggctcagaccggcggaaccgcgcagtttgaggctattattgaaggagacccacagccttctgtgacttggtacaaggactccgttcagttggttgattccactagactctcgcaacaacaggagggcaccacttactcattagtactgaggcatgttgcctctaaagacgccggagtctatacctgcctggcacagaataccggaggccaggtgctgtgcaaggctgaactccttgtgcttggcggtgacaacgaaccagactctgaaaagcaatcacaccgcagaaagttgcactccttctatgaggtaaaggaggagatcggtcgcggtgttttcggcttcgtgaagagggtgcagcataagggtaacaagatcctgtgtgccgctaaatttatccctctgagatctagaacgcgggctcaggcctacagagagagagacattctcgctgcgctgtctcaccctctggtgactggtctgttggaccaatttgaaactcgaaagactctgattctgatcctggagctgtgctcgagcgaggaacttctggacagactgtatcggaaaggtgtggttactgaagcagaagtgaaggtatatatccagcagttggtggaaggcttacattatctgcatagccacggcgtgttgcatctggacatcaaaccctcgaacatactcatggttcatccagcgagggaggatatcaagatatgcgattttggctttgcacagaacatcacaccagcagagctccagttttcgcagtatggttctcctgaatttgtctcacctgagattatccagcaaaaccctgtcagcgaggcctcagatatctgggctatgggagttattagctacctgagcctaacgtgcagtagcccctttgccggtgaatccgatcgagccacattattgaacgtgctagagggaagagtgtcttggtcctcccccatggccgcacatttgtctgaggatgccaaggacttcataaaggcaacactccagagagctccccaggctcgtcctagcgccgcacagtgcctgtcccacccttggttcctaaagtcaatgcccgcagaggaagcacacttcatcaacacgaagcagcttaagttcctgctggcaagatcgcgatggcagagatcactaatgagctacaaatctatactagttatgcggtcaatcccagagctactgcgcggaccccctgacagtccatcgttgggggtcgcacggcacctgtgccgggacaccggaggctcctcttcctcaagttcatctagcgataatgaactcgctccgtttgcacgcgctaagagtctccccccaagtcctgtaacacatagcccgctattgcatccccgaggcttcctgcgacctagcgcaagcctgccggaagaagccgaggcaagcgagcgaagcacggaggctcctgccccaccggctagcccagagggggctggcccaccagcagctcaggggtgcgtacctagacattcggtcatccggagcttgttctaccaccaggctggggaaagtccagaacacggggcactggcgcctggatctcgccgtcaccccgcacgacgccgacatttgctgaaaggcggatacatcgctggcgctctgcccggattgcgggaacccctgatggagcacagagtgttggaggaggaggccgcaagagaggaacaggccacactgctggccaaagcaccctccttcgagaccgctcttagactcccagcgtctggcactcacctcgccccaggccacagccactcccttgagcatgacagccccagcacaccaaggccgtcgtcagaagcgtgtggagaggcgcagagattgccctctgctccctccgggggagcccctattagagacatgggacacccccagggaagcaagcagctgccctccacagggggtcaccctggtacagctcagcccgaacgaccctcacctgattcaccttgggggcagcctgctccgttctgtcacccgaagcagggcagcgcccctcaggagggatgctcccctcatccagctgttgcgccatgcccccctgggtcgttccccccaggatcctgtaaggaggcgcctctagttcccagttcaccctttctagggcagccacaggcgcctcccgctccagcaaaggcttcaccgccactggatagcaagatgggacctggtgacatttctctgcctggacgtccaaagcccggaccttgttcctccccagggtccgcttcccaggcatccagttctcaagttagctctctccgggtgggtagctcccaggtggggactgaacccggaccgagcctcgacgctgaggggtggactcaggaggcagaggacttgtccgattctacccctactctgcagcgcccacaagaacaagctaccatgcggaaattttccctgggagggagaggtggctatgctggtgtggctggatacgggacgttcgctttcggtggtgatgccggaggcatgctgggtcaagggccaatgtgggcaagaatcgcttgggccgttagccaatcagaagaggaagaacaggaggaggctagggcagagagtcagagtgaagaacagcaggaggctagagccgaatcccctctgccacaggtttctgcgagacctgtgcccgaggtcggtagggcacctaccagaagctcccccgagcctaccccctgggaagacatcggccaggtgtccctggtgcagatacgagacctgagcggcgatgcagaagcagccgacacaattagcctggatataagcgaagtggaccctgcttatctgaatcttagcgacctctacgatataaagtatttgccttttgagttcatgattttcagaaaggttcccaaaagtgcacaacccgaaccacccagtcccatggccgaggaggaattagccgagttccccgaaccaacttggccctggccaggggagttgggaccccacgcgggattagaaataaccgaggaatctgaggatgttgacgcactgctggcagaagccgctgttgggcgaaagcggaagtggagcagtccgtcccggagtttgtttcactttcccggaaggcacttgccacttgacgaacccgcagaactcgggctgcgcgaacgcgtcaaagctagtgtcgaacatatctctcgcattctgaagggacgcccagagggtcttgagaaggaaggtcccccacggaagaagccaggactggccagctttagattatccggtctcaagtcctgggaccgagcccctactttcctgcgagaactcagtgatgaaacagtcgtcctgggccaatctgtcacccttgcatgccaggtttctgcccagcccgctgctcaggccacatggagtaaagacggagccccactggagagcagttcgcgcgtgctcatcagcgctactctcaagaattttcaactattgaccattctggttgtggtggccgaagatctcggagtgtatacctgttccgttagtaatgcacttgggacagtgacaaccacaggagtactccggaaggcagagagaccctcatcatccccctgtcctgacatcggggaggtctacgctgatggagttctgctggtctggaagcctgttgaatcttatggcccagtgacctatattgtacagtgtagtctggaggggggatcctggactacgttagcttcagatatttttgactgctgctacctcacgtctaaactgagtagaggaggcacctacacctttagaactgcttgtgtatccaaggctggcatgggaccatattccagtccaagtgaacaggtgcttctgggtggaccctcccatctagcctccgaagaggagtcccaggggcgatcggctcaacccctaccttcaacgaagacatttgcctttcaaacacagatccagagaggcaggttttctgtcgtcagacagtgctgggaaaaagcatctgggagggcattggccgcaaaaatcattccatatcatcccaaggataaaaccgctgtgcttagagagtacgaggccctcaaaggtctcaggcacccccacctagctcaactccacgccgcatacttgagtccccgacatctggttcttatcttggaactgtgttcaggccctgaactgctaccatgtcttgcggagagggcatcctactctgaatccgaggtgaaagactacttgtggcagatgctttcagctacccaatatttgcataaccagcacatcttacacctcgaccttagatcagagaacatgataattactgaatataacctgctgaaagtcgttgatctgggtaacgcacagtctttgtcccaggagaaagttctgccaagcgataaatttaaggactatcttgaaacgatggagctactcgaaggacagggggctgtccctcagacagacatctgggcaatcggtgtcaccgcctttatcatgttgagtgccgaatacccagtgtcaagcgagggagcacgagacttgcagcgagggcttcggaagggtctagtgaggttaagccgatgctacgcgggtttgtctggtggtgctgtggctttccttaggtcaaccctgtgtgcgcagccatggggcaggccatgcgccagctcctgtctgcagtgcccctggctcacggaagagggaccagcctgtagtcgcccagctcctgtcacatttccaactgcaaggctgagagtttttgtcaggaaccgggagaagcgccgagccctcctgtacaaacgtcacaaccttgcccaggttcggta

SEQ ID NO: 30412 - DNA, 1749 bp, synthetic construct
  source 1..1749: mol_type = other DNA; note = Synthetic coding sequence
atggagaaagcggtgaacgacggctctcatagcgaggagttattctgtcacttgaaaaccatttccgagaaagaggacctgcccaggtgtacttccgagagtcatctgtcatgtcttaagcaggatatcctgaacgagaagacggagctcgaggctaccctgaaagaagctgaactggtgacacatagtgtggaactgctgcttcccctgttcaaggacacaatcgagaagatcaacttcgagaacgccaatttaagcgctcttaacctgaagattagcgagcagaaggagatcctgataaaagaactggacacctttaaaagtgttaagctggcactcgagcatctgctccggaaacgggactacaaacaaactggagacaatctgtcttccatgctgctggagaacctgacggacaatgaatctgaaaacaccaacctgaagaagaaagtgttcgagaaagaagcccacatccaagagctctcatgtctgttccagagcgagaaagcgaatacacttaaagcgaatcggtttagccagtccgtgaaggtcgtgcacgagcgtctgcagattcagatccacaagagggaagcggagaatgacaaacttaaggaatacgtgaaatccctagagacaaagattgctaagtggaatctgcagagccggatgaacaaaaacgaggctatagtcatgaaggaggcctcgaggcagaagacggtggctttgaagaaggcttctaaggtttataaacaacggctggaccactttacgggtgccatcgagaaactcacgtcacagattagagatcaggaagcgaagctaagcgagactataagcgccagtaacgcttggaaatctcattatgagaaaattgtgatcgagaaaaccgaactggaagtccagattgagaccatgaagaagcagattataaatctgctggaggatcttaaaaaaatggaagaccatggcaagaattcctgcgaagaaatacttagaaaggtccattctatcgagtacgaaaacgagaccctcaacctcgagaacacgaaacttaagacaactctggctgcacttaaggatgaagttgtatcagtcgaaaacgaattgagtgagctgcaggaagtggagaaaaaacaaaaaaccctaattgaaatgtacaagacacaagttcagaagctccaagaagccgctgaaatagtgaaaagccgatgcgagaatctgctgcacaagaacaatcaaatcacaaaaactaagaataagaacgtggaaaaaatgagagggcagatggagtcgcatctaaaggagctcgaaagggtgtgcgacagtctgacagcagcagagaggcgactacacgaatgccaggttgacggtaatcataacctgctcaccaaactgtctctggaggaggagaattgcttaatccagctcaagtgtgagaacctccagcagaagctggagcagatggacgccgaaaacaaggaactggagaaaaagctcgccaaccaagaagaatgtctaaaacactcgaacttaaagtttaaggagaaatccgcagagtataccgcgctggcccgacaacttgaggctgcactggaggaaggaaggcagaaagtagctgaggagattgagaaaatgtcaagccgggagtctgctttgcagatcaagatcctcgacctcgaaacggagctcaggaaaaagaacgaggagcaaaaccaactcgtgtgcaaaatgaatagtacgaatgggtag

SEQ ID NO: 30413 - DNA, 384 bp, synthetic construct
  source 1..384: mol_type = other DNA; note = Synthetic coding sequence
atggtcagcagcgggaggcggtggttgagagagcagcaacacagaaggtggcggctgcattgcctgaagttacagcccctgagtccggtgccctccgatatcgaaatctcaagaggtcaaactccgaaggccgtcgacgtcctcgctaaggaaattggattgcttgctgacgaaattgagatctacggcaagtctaaagccaaggtccggctcagcgtcctcgagcgactgaaggaccaggccgacggcaaatacgttcttgtcgccggaataacccctacgcccctgggcgaggggaaatcaacggtgaccattgggcttgtgcaggccttgactgcgcatctcaatgtgaattcatttgcatgtctgcgtcagcccagctag

SEQ ID NO: 30414 - DNA, 1929 bp, synthetic construct
  source 1..1929: mol_type = other DNA; note = Synthetic coding sequence
atgaagattttttgttccagggccaatcctacaaccggctccgtggagtggctggaggaagatgagcattatgactaccaccaggaaatcgccagatcatcctacgcagacatgcttcacgataaggatcgggtgttcaagccgatggcagacgccgcagtgaagatcgtggagaagaatggattttcggataaaattaaggtgattaacaagcactctaccgaggtcactgttggcccagaaggcgacatgccttgcagggctaatatactggtgactgagttgtttgacaccgagctcatcggggaaggcgcactgccaagctacgagcacgcacacagacatttagtggaggagaactgcgaagcagttcctcaccgcgcaacggtctacgctcagctggtggagtctggcagaatgtggtcttggaacaaactgttcccgatccacgtgcagacctcactgggagagcaagttattgtacctcccgtggacgttgaaagctgtcccggagcgccaagtgtttgtgatatccagctgaatcaagtgagtccagccgattttactgtgctgtccgatgtcttacccatgtttagcattgattttagcaagcaggtgagctcctccgccgcttgccattcacgcagatttgaaccgctgactagcggacgggctcaggtcgtacttagctggtgggacattgagatggaccctgagggaaagattaaatgcaccatggcccctttctgggcccacagcgatcctgaggagatgcagtggcgagaccactggatgcagtgtgtgtattttttgccgcaagaggagccagttgtgcaggggtcagcattatacctggttgctcatcacgatgattattgcgtgtggtattcactccaaagaacaagccccgagaaaaacgaaagggtgcgccagatgcgccctgtgtgcgattgccaagcacaccttctctggaatcgcccacgcttcggggagatcaacgaccaggataggaccgatcgatatgtgcaagctctccggacagtactgaaacccgatagtgtgtgcctgtgtgtctctgacggatcccttttgtctgtgttagctcaccacctgggcgtcgaacaggtttttacagtcgaaagtagtgcggcttctcacaaattgctgcgtaaaattttcaaggcgaatcatctggaagataaaattaacattatagagaaaagacccgagctcctgacaaacgaggacctgcaggggaggaaggtatcactgctcttgggtgagccctttttcactacctcactcctgccttggcacaatttgtacttctggtatgtccgcactgctgtcgaccagcatctcgggccaggagcaatggtgatgcctcaggccgctagcctgcacgcagtggtggtggagtttcgtgacttatggaggatccgttctccatgtggcgactgcgagggattcgacgtgcacataatggacgacatgataaaacgggctctcgactttagggagtccagagaggccgagccacatcccctgtgggaatatccctgccgctccctgagcgaaccctggcaaattctgacatttgatttccagcagcccgtccctttgcagcccctgtgtgccgaaggtacagtggagttgcggcgtcctgggcagtcccatgctgccgtgctctggatggaataccatttgacgccagagtgtaccctctcaacaggcttgttggagcctgcagatccggagggcggatgctgctggaacccacactgtaagcaagctgtgtacttcttctctcctgcacctgatcctcgcgcactgttgggcggtccacggactgtctcttatgccgtggagtttcatcctgacactggcgatatcatcatggaattccggcacgctgatacccctgattag

SEQ ID NO: 30415 - DNA, 300 bp, synthetic construct
  source 1..300: mol_type = other DNA; note = Synthetic coding sequence
atggttgtgaagctgctttccaacaaaaggagccaagcggttgggattcttatgagctccctgcatcttgacatgaaagatattcagcacgcggtcgttaatttggacaattcagtcgtagatttagaaaccctgcaggcattgtatgagaaccgggcacagtctgacgaactggaaaagattgaaaaacacggcagatcatcaaaagacaaagagaatgctaagagtctcgataagcccgaacagtttttgtatgaacttagcttaatccctaatttctccgagcgcgtcttttgttag

SEQ ID NO: 30416 - DNA, 390 bp, synthetic construct
  source 1..390: mol_type = other DNA; note = Synthetic coding sequence
atgggcggatgcttttcaaagcccaagcccgttgaactcaaaatcgaggtggtgctgcccgaaaaagaacgaggaaaagaggaactttccgcctccggcaagggatctccccgagcctatcaggggaacgggactgcaaggcattttcacacagaagagcggctttcaacacctcacccttacccaagcccccaggactgcgtggaagccgctgtgtgccacgttaaggacttggagaatggacagatgcgcgaggtggagctgggctggggcaaggttctcctggtgaaggacaatggggaattccatgccctgggccacaagtgtccgcattatggggcaccgctcgtgaagggagtcctctcccggggtagagtccgttgtccctag

SEQ ID NO: 30417 - DNA, 453 bp, synthetic construct
  source 1..453: mol_type = other DNA; note = Synthetic coding sequence
atgaatctagccgagatctgcgataatgccaaaaaaggcagagagtacgcactgctaggaaattacgactccagcatggtctattatcaaggggttatgcagcagatccagagacactgccaatccgtccgggacccagcgatcaagggaaagtggcaacaggtacggcaggagctgctggaggagtacgagcaggtaaaaagtatcgtcagcaccctcgaaagcttcaaaattgacaaaccccctgactttcccgtctcatgccaggacgaacccttcagggacccagcggtctggccccctccggtgcccgctgagcacagagcccctccccagattcgtcgaccaaacagagaggtgagacccctccggaaggagatggcaggcgtcggggcaagaggaccagtcggacgagcccatccaatttccaagtctgagaaaccgtccacttag

SEQ ID NO: 30418 - DNA, 498 bp, synthetic construct
  source 1..498: mol_type = other DNA; note = Synthetic coding sequence
atgggagtgaaccagagcgttgggtttcctccagtcacaggcccacatctggtgggctgtggggatgtcatggaggggcagaacctgcaggggtccttctttcggctgttctacccgtgccagaaggcggaagaaaccatggagcagcccttatggatccctagatacgaatattgcaccgggcttgccgagtacctgcaatttaataagagatgcggcggtcttctgttcaatcttgctgtcggcagttgccgactgcccgtgagctggaacggcccattcaagaccaaagactcagggtaccccttgattatattctctcacgggcttggggcttttaggacactttatagcgccttctgtatggaactagcctcacgaggattcgtcgtggcggtgccagaacacagagatcggagcgctgcaaccacatatttctgcaaacaggcccctgaggagaatcagcctacgaatgagagtctgcaggaagaatggtag

SEQ ID NO: 30419 - DNA, 270 bp, synthetic construct
  source 1..270: mol_type = other DNA; note = Synthetic coding sequence
atgtccgagcagggggacctaaaccaggcgatcgctgaagaaggaggaacggaacaggagacggcgacaccggaaaacgggatagtcaagtcggagagcttagatgaggaggaaaagctggaactccagcgcaggctcgaagctcagaatcaagaacgacggaaaagcaagagcggcgctggaaaggggaaattaaccagaagtttggctgtgtgtgaggagtcttccgctcgcccaggtggcgagtccctgcaagatcagaccctctag

SEQ ID NO: 30420 - DNA, 6008 bp, synthetic construct
  source 1..6008: mol_type = other DNA; note = Synthetic coding sequence
atggaggagcgtaagcacgaaacgatgaacccggctcacgtgctgttcgatcggtttgtgcaggctacaacgtgtaagggcaccctcaaggcattccaggagttgtgcgaccacctggaattgaagcccaaagattatcgctcattctatcacaaactcaagtccaaactgaactactggaaggctaaggctctgtgggccaagctagacaagagaggtagccacaaagattacaagaaagggaaagcctgtaccaacactaaatgcttgatcattggagccggtccttgtgggctgcgaactgccattgacctgtcattactgggtgctaaagtggtagtgatagagaagcgggacgcattttctaggaataacgtgctgcacctttggcctttcacgattcatgatttacggggactgggcgcaaagaagttttatgggaagttctgtgctggggctatagatcacatctccatccgacaactccagctgatcctgctgaaagtggctctcattctgggtatagaaattcacgtgaacgtagagtttcagggtctgattcagcccccagaagaccaagaaaatgagcgaattggttggagggcactggtgcatccaaaaacacatccagtttccgagtacgagttcgaggtaatcataggtggcgacgggaggaggaacacactagaggggttccgacggaaggagttccgcggaaaactggccatagccattaccgcaaattttatcaatcggaacacaacagcggaagcaaaggtagaagagattagcggcgtggctttcatctttaatcagaaattctttcaggagctcagagaggccaccggtatcgacctcgagaatattgtctattataaggatgacactcattatttcgtaatgaccgctaaaaagcaatcactgctcgacaagggggtgatcctccacgactatgccgataccgaactgttattgtcccgggaaaatgtcgaccaggaggccctgctctcctacgctagagaagccgctgacttcagtacgcagcagcagttaccaagcttagactttgctatcaaccactacgggcagccagacgttgccatgtttgattttacctgcatgtacgcgtcagagaatgccgctcttgtcagggaacagaacggccatcagctactggtggcgctagtgggagattcacttctggaacctttttggcctatgggcaccggaatcgcgagagggttcttggcagcgatggattccgcctggatggtgagaagctggtccctcggtacaagccccctggaggtgctggcggagagagagtctatttatagactgcttcctcagacaactccagagaatgtctctaaaaatttctctcagtactctatcgaccctgtaacccggtaccctaatattaacgtaaacttcctgaggccttcccaggtcagacatctgtatgataccggtgaaacaaaagacatacatctcgaaatggagtcactggtcaattcccgtaccactcctaagctcacacggaatgagtctgtggccaggtctagcaagctgcttgggtggtgtcagaggcaaacagacggctatgccggtgttaacgtgacggacctgactatgtcctggaagtcaggccttgccttatgcgccattattcaccgctacagacctgacctgatcgatttcgactcgctggacgagcagaacgtcgagaaaaataaccaacttgccttcgacattgccgaaaaagagttaggcattagccccattatgactggtaaagagatggcctccgtgggtgagcctgataagctctctatggttatgtatctaacccagttctacgagatgtttaaggattctctgcccagtagtgatacactcgacctgaacgccgaggaaaaggccgttctgattgccagcacccgctctccaatctcctttttatcaaagctgggccagacaatttcccgcaagcggtcacctaaggacaagaaggagaaggacctggatggagccggaaagcgaagaaaaacgtcacaaagcgaggaggaggaggcgccacgcggtcacagaggcgaaagacctaccctggtctccacattgactgacaggcgaatggacgtggccgttggcaaccagaataaggtaaagtatatggccacacagctgctggctaagtttgaagagaacgcgccagcacagagcatcggaatccgacgtcagggatctatgaaaaaggagtttccgcagaacctcggcggaagtgatacatgctacttttgccagaagagagtgtacgtgatggaaaggctgtcagctgagggaaaattcttccatagaagctgcttcaagtgcgagtattgcgccaccacactcaggttgagtgcttacgcatacgacattgaggacgggaagttttactgtaagcctcactactgttaccggctgagcggatacgcccaaaggaagcggccagctgtggctcctcttagcggtaaagaggctaaaggtccactgcaggacggcgcaacaaccgatgccaacggcagagcgaatgcagtagcaagttcaaccgagagaacccccggatctggtgtgaacggtcttgaagaaccaagtatagcaaagcgacttcggggtacccctgaaaggatcgagcttgaaaattaccgactgtccctgagacaagctgaggccctgcaggaagtgcctgaggagacccaagctgagcataacttgtcaagcgtgctggatacaggagcagaggaggacgtggcatccagttcctccgagagcgagatggaggaggaaggcgaagaggaggaagaagaacctagactgccaccgagcgaccttggtggagtcccttggaaggaagcggtgaggatacatgctctgctgaagggaaagtccgaggaagaactggaggcaagcaaatcattcggtccaggtaacgaagaggaggaagaagaagaggaagaatatgaagaggaggaggaagaagactatgatgaggaagaagaagaaagctccgaggcaggaaaccaaagactccagcaggttatgcacgcggctgaccctctggaaattcaggccgacgttcactggacccatattcgggaacgagaggaagaagaacggatggctcctgcaagtgaaagctcagcatcgggggctccgcttgacgaaaacgatctggaagaggatgtagatagcgagcccgcagagattgagggagaggccgctgaggatggcgatccaggggacaccggggctgagttggatgacgaccagcactggtcggactccccgtcagacgcagaccgggagcttcggcttccatgcccagcggagggcgaagcggagctggagttgagggtgtccgaagatgaggaaaagcttccagcgtctcctaagcaccaggagaggggaccttctcaggctacctcccccatacgaagtccacaggaatcagctcttctgttcatccccgttcacagccctagcacagagggcccacagctccccccagtgccggctgccacacaggaaaaaagcccagaggagaggctattccccgagcctcttttgcccaaggagaagccaaaagccgacgctcccagcgatctcaaggcggtgcacagccccattcgttcccagcccgtgaccttgcccgaagcaagaaccccagtgtcccccggatccccccaaccccagcctcctgtagcggcaagcacaccccctccctccccactgccaatctgctctcagcctcagccttctacagaagccactgtcccttctccaacacagagcccaatccggtttcagcctgcccctgcaaaaacttctactcctctcgccccactgcccgtccagagccagagcgataccaaagatcgcctaggcagcccactggccgtcgatgaggcccttagacggagcgaccttgtggaagagttttggatgaaaagtgccgaaattcgcaggtcactcgggctaacccctgtggacaggagcaaaggccctgagcccagtttccccacgcccgctttccgtcctgtaagcctcaaatcctactcggtggagaagtccccacaggatgagggcctgcacttattgaaacccctgtcaattcccaagcgcttgggcctaccgaagcctgaaggggaacctctatcacttcctacccctcgctctcccagcgatcgggagctcagatcagctcaggaggaacggagggagctatcttcttctagtggactgggacttcatggtagctccagtaacatgaagactctgggtagtcagagctttaatacaagcgactccgccatgctgacgccaccttccagtccccctccccctccaccacccggtgaggaaccggcaacgctcaggcgaaagctccgagaggccgaaccaaatgcatctgtagttccccctcctttaccagccacttggatgcggccacccagagagcccgctcagccacccagggaggaagtccggaagtccttcgtggaaagcgtggaagagattcccttcgcggacgacgtggaggacacgtacgacgacaagacagaagactcatctctccaggagaaattcttcacgccccctagctgctggccaaggcccgaaaaaccgagacacccccctcttgcaaaggagaacggacggctccccgctctcgaaggtacactgcagccccagaaaagaggtctccctctcgtttccgcggaggccaaggagctcgcagaggagagaatgcgggctcgcgaaaagtccgtgaagagtcaggcactaagagacgcaatggccaggcagctgtctcggatgcagcagatggagctcgcaagtggcgcaccccgacctcgaaaagcatcgtccgcccctagtcagggcaaggagcgcagacccgatagccctacccgcccaactttacgaggaagtgaggagccaactcttaaacacgaggccactagcgaagaagtgttgagccctccctcagatagcggcggacctgacgggtccttcacttcctccgagggttctagtggcaagtcgaaaaagcgatccagcctgtttagcccacggcgtaataaaaaggagaagaagagtaagggcgagggcaggccaccagagaaacccagctcgaatctgttggaggaagccgctgcgaagcccaagtccttatggaagagcgtgttttccggatacaagaaggataaaaagaagaaggcagacgataaatcatgccctagcactcctagttccggagccactgttgacagtggcaagcatagggtgctccctgtggtgagggctgaactacagctcagaagacagctgtcattctctgaagattctgacttgagcagtgacgatgtgttggagaagtcgtcacagaaatcccgcagagaaccgcgaacctataccgaggaagaactgaacgcgaagcttacacggagggtgcagaaggccgctaggagacaggcaaagcaagaagagctgaagcgcctgcatcgggcacagatcattcagcgccagctgcagcaggtggaggagcgccagcgcaggctcgaggagagaggagttgccgttgagaaagccctgcgaggagaggctgggatgggcaagaaggacgatccaaagctgatgcaggaatggtttaagctggtgcaagaaaagaacgcaatggtccgatacgagtctgaattgatgattttcgctagggagctggaactcgaggacagacagtctaggctgcagcaggagcttcgcgagaggatggctgtagaggaccacctgaagaccgaggaggaactgtccgaggagaaacaaattttgaacgaaatgctcgaagtggtcgaacagcgtgactctttggtagctctcctcgaagaacaacggctccgggaaagggaggaagataaagatctggaagccgctatgctttcaaaaggcttttccctcaattggtcgta

SEQ ID NO: 30421 - DNA, 540 bp, synthetic construct
  source 1..540: mol_type = other DNA; note = Synthetic coding sequence
atgagctcaaacgagtgttttaagtgcgggagaagtggtcactgggcgcgagaatgccccacgggcggaggacgcggacggggtatgagaagccgagggagaggaggtttcacctccgaccgcggatttcagtttgtctcctcaagcctgccagatatttgctatcgatgtggcgagtctggtcatctcgctaaggattgcgatctacaagaggacgttgaggcttgctacaattgtggaagagggggtcatattgccaaggactgcaaggaaccaaagcgcgaacgtgaacagtgttgttataattgcgggaaaccgggacacctcgctagagactgcgaccacgccgacgaacagaaatgctacagttgtggggaatttggacatatccaaaaggactgtacgaaggtcaaatgctatcggtgcggcgagaccggccacgtggccatcaattgcagcaaaacatcagaggtgaactgttaccgctgcggtgagtctggccatctcgctagagaatgcactatcgaggccactgcatag

SEQ ID NO: 30422 - DNA, 1140 bp, synthetic construct
  source 1..1140: mol_type = other DNA; note = Synthetic coding sequence
gctagagcagttccagtggggtccggtctgaggggactgcaaaggacgctgccactcgtggtgattctgggagctactggcactggtaagtctacattagctctgcaattgggacagcgtctcggaggtgagatcgtttccgccgactccatgcaaccccaagaaatggggacagaaaaagtgatcgataggaaagtcgaactcgaaaaggaggatggcctggtacttcacaaacgtctgtcacaggtggatcctgaaatggccgctaaactgcaccctcacgataaacgtaaggtggccaggagtctgcaagtgttcgaagaaacaggcatatcacattcagagttcctccacaggcaacacaccgaggagggtggcggaccgttaggcggacccttgaagtttagtaatccctgcatactttggctgcatgcagatcaggccgatgaaagactggacaagcgggttgacgatatgctggcagccggactgctcgaagagcttcgggatttccatcgcaggtataaccagaaaaatgtatcggagaattcccaagattaccagcacggaatattccagagtatcgggttcaaagagtttcatgagtacctgatcactgaaggcaaatgcaccctggagacttccaatcaactgctgaagaaaggcattgaggcacttaagcaggtgacaaagcgatatgcacggaagcagaacagatgggtgaaaaatagatttctgtcccgccctggcccaatcgtacccccagtgtatggccttgaggtgtctgatgtctccaagtgggaggaaagtgtcctagagcctgcgctggaaatagtccagtcttttattcaggggcacaagccgacagctacacccatcaagatgccctacaacgaggctgagaataagagaagttaccacctctgcgatctctgtgatcgaattatcatcggggacagggagtgggctgcccacatcaagagcaagtcacatttgaaccagttaaaaaaaagacggaggttggacagcgacgcagtcaacacaatcgagtcccagtcagtgtctcctgatcacaataaagagcccaaggagaaggggtccccaggccagaatgatcaagagctcaagtgttccgtgtag

SEQ ID NO: 30423 - DNA, 483 bp, synthetic construct
  source 1..483: mol_type = other DNA; note = Synthetic coding sequence
atggaagcagaaagaccccaggaagaagaagatggggaacagggtccccctcaagatgaggagggctggcctccccctaatagcaccacacgtccttggcggtccgctcctcctagccctcctccacctggaaccagacacaccgcccttggaccccgatccgcaagtcttttgtcgctccagaccgaattgctgctggacctagtggctgaggctcagagtagacgactggaggagcaacgggcaaccttctacacacctcagaatcctagttcccttgcccctgctccactccggccactcgaagacagggagcagttgtactcgaccatcctgtcccaccagtgccagaggatggaggcccaaaggagtgaaccccctcttcctcctggtggacaggagctgctagagctcttgttacgagtgcagggcggtggtcggatggaagaacagagatcacgaccacccacacacacatgctag

SEQ ID NO: 30424 - DNA, 816 bp, synthetic construct
  source 1..816: mol_type = other DNA; note = Synthetic coding sequence
atgaacctggagaagcttagcaagccggaacttctgacgctgttttccatccttgagggggagctggaagctcgggacctggtcatcgaggcactcaaagcgcaacacagggacacatttattgaggagaggtatggtaagtacaacatttccgatcctctaatggcactacagcgagattttgagacactgaaagaaaagaatgatggagagaagcagcctgtttgcacaaaccctctcagtatcctgaaggttgttatgaagcaatgcaaaaacatgcaggaacgcatgctatcacagctggcggctgcagagtctcgacacagaaaggttattctggatctggaggaagagcgtcaacggcacgcccaggacacggcggaaggcgacgatgtcacttatatgctcgaaaaggagagggaaagactcacgcagcagctcgagttcgagaagtcgcaggtgaagaagttcgagaaagagcagaaaaagctgagttctcaactggaggaggaaaggagcaggcataagcagcttagcagcatgttagtcctcgagtgtaagaaggctacaaacaaggctgcggaagaaggtcaaaaagcaggagagctgtctctgaaactcgaaaaagaaaagtctagagtctcgaagttggaagaggaactggcagctgagcgtaaaaggggcctgcagaccgaggctcaagtggagaagcagctgagcgagtttgatatcgagagagagcaactgagagccaagctgaacagagaggaaaacaggacaaagacattaaaagaagaaatggaaagtctgaaatag

SEQ ID NO: 30425 - DNA, 1482 bp, synthetic construct
  source 1..1482: mol_type = other DNA; note = Synthetic coding sequence
atggatcaagattacgaacgcaggctgttgaggcagattgtgatccagaacgaaaatacaatgcctcgcgtcaccgaaatgcgcagaaccttgactcctgcttcctcacccgtttcaagtcccagtaaacacggggataggtttatcccctcaagggctggcgcaaactggagcgttaatttccacagaataaatgagaatgagaaatcgccaagccaaaatagaaaggccaaggatgcgacatctgacaacggaaaggatggccttgcgtattcagcactgctgaagaacgaactgctgggtgctggtatcgaaaaggtgcaggatccacagacagaagaccgccgactccagccctccacaccagagaagaagggcctgttcacttactccctatctaccaaaaggagctcacctgacgacgggaacgatgtctccccttattctctgagtcctgtgagcaacaaatcccagaaactgctgaggtccccacggaagccaacacgaaaaatttctaagatcccgttcaaggtgctagatgctcccgaactccaggacgatttttacctgaacttagtagattggtcctctctgaatgtgctgagcgtcggactcggaacatgcgtgtatctctggagcgcctgcacaagtcaggtcacacggctttgcgatctgtccgtggagggagacagtgtcacgagtgtgggttggagcgaaagagggaacctagtggcagtgggcacgcacaaaggctttgtccagatctgggacgctgccgcaggaaagaaattgtctatgctggaaggtcataccgccagagttggcgctctggcctggaatgctgaacaactgagctctgggagtcgcgaccgcatgattctgcagagagatattcgcaccccacctcttcaatccgaaagaagactgcagggtcatcggcaagaggtgtgcggactcaagtggtctacagaccaccagttgttggcttccggagggaatgacaacaaactcctggtgtggaatcactctagccttagtccagtgcaacagtataccgagcacctagcagcagtcaaagctatcgcatggtcaccccatcagcacggcctcctcgcatccggagggggtacagcagatagatgtatacgattttggaataccctgaccggccagccattacaatgcatcgatacaggaagtcaggtttgtaatctcgcatggtcaaaacatgctaacgaattggtctccacccacggatacagccagaaccagatcctggtgtggaagtacccatcccttacccaagtggccaagcttactggtcattcgtaccgggtgttgtatcttgctatgtcaccagacggggaggcaattgtcacaggcgctggagacgaaaccttgcgcttctggaacgtgttcagtaagacccggtccacaaaggagtccgtgtccgttctcaatctgttcacccggatacgatag

SEQ ID NO: 30426 - DNA, 552 bp, synthetic construct
  source 1..552: mol_type = other DNA; note = Synthetic coding sequence
atgaagaaggaacatgtgctccactgccagtttagtgcatggtaccctttcttccgaggtgtcactataaagagtgtgatcctcccactgccccagaacgtcaaggactatttactcgatgatggcactctggtggtgtcaggtcgtgatgacccaccgacacactcacaaccagactctgatgatgaagccgaggagatccagtggtctgacgacgagaacactgccaccttgaccgacgcttactggatcgcaatgaatagtagcctcaaatgtaagaccctcagcgacatctttctgctattcaagtcctctgatttcataactcgggatttcacacagcccttcatacactgcaccgacgactcgccggacccctgtatagagtatgaactggtcctgcgtaaatggtgtgagctgatccctggcgctgaattccgctgttttgtcaaagaaaataagttaattgggatctcacagcgcgattatacacagtactacgatcacatctcaaaacagaaggaggagattcgcaggtgcattcaggattag

SEQ ID NO: 30427 - DNA, 672 bp, synthetic construct
  source 1..672: mol_type = other DNA; note = Synthetic coding sequence
atggaagacgtgaagctggagttcccttccttacctcagtgcaaagaagatgctgaagagtggacctaccccatgagacgagagatgcaggaaatccttcccggtttgtttcttggtccctactcctccgctatgaagtctaagctcccagtactccaaaaacacgggataacacacattatttgcatccggcagaacatagaggctaattttattaagcccaatttccagcagctattcaggtacctggtcctggatattgcagacaacccagtggaaaatataattaggttttttccaatgaccaaggagttcattgacgggagcctgcagatgggaggtaaggtgctggttcatggtaacgccggtattagccgctccgccgcattcgtgatagcatacatcatggagactttcggcatgaagtatagagatgccttcgcctacgtacaggaaagaagattctgtatcaaccctaacgcaggctttgtgcaccagctccaggagtacgaggccatatatcttgctaaactgacaatccagatgatgtcccccctgcaaattgagcggtccctgtccgtgcactctggcacgacaggttcactgaaaaggacgcacgaagaggaagatgacttcggcaccatgcaggtggccactgctcaaaatgggtag

SEQ ID NO: 30428 - DNA, 348 bp, synthetic construct
  source 1..348: mol_type = other DNA; note = Synthetic coding sequence
atgcccatcctgctgtttctaatcgataccagcgcaagtatgaaccagcggtcacacctcggcactacatatctggacaccgccaagggcgcagtcgagactttcatgaagctgcgcgctcgcgatcctgcttctcggggagacaggtacatgcttgtcacctttgaggagccaccctacgcaatcaaagccggttggaaggaaaaccacgccacattcatgaacgagttaaaaaatctccaagcagagggactgactaccttaggacaatctctgaggactgccttcgatctgctgaacctgaatcgtttagtaactggtattgacaactatggacaggtggggtag

SEQ ID NO: 30429 - DNA, 390 bp, synthetic construct
  source 1..390: mol_type = other DNA; note = Synthetic coding sequence
atggccgaactgatccagaaaaagttgcagggcgaagtggagaaatatcagcagctgcagaaagatttatcaaaatctatgagtggaaggcaaaaattagaagcccagctaacagagaacaatattgtaaaggaagagcttgccctgcttgacgggagtaacgtggttttcaaattactggggccagtgcttgtgaagcaagagctgggggaggcccgtgcaaccgtgggaaaacgcctggattatatcacagctgagattaaaagatatgagagtcaactccgcgacctggagcgccaatctgagcagcagcgagagacactggcccaactgcaacaggagttccagcgcgctcaggctgcgaaggccggagcgccagggaaggcttag

SEQ ID NO: 30430 - DNA, 2676 bp, synthetic construct
  source 1..2676: mol_type = other DNA; note = Synthetic coding sequence
atggtagcaccagtgctggaaacttcccacgttttttgttgccccaatcgtgttagaggggttttaaactggtcctctggcccacggggtctgctggctttcggcaccagctgctctgtggtgctgtacgatcccctgaagcgcgtggtagtcactaacctgaatgggcacaccgcccgtgtaaactgtatccagtggatttgcaagcaagatgggtctccgtcaacagagttggtgagcggaggctcagataaccaggtcatccactgggaaatcgaggataatcagctcctgaaggccgtacacctccaagggcacgagggcccagtctatgctgtgcacgctgtgtaccagagacgaacttctgatcccgctttatgcaccctgatcgtgtctgccgctgccgattctgcagtacgtctgtggagcaaaaagggccctgaggtaatgtgtcttcagactcttaatttcgggaacggattcgcactggcactttgcctcagttttttgcctaacactgacgtaacctggaaaaccggacaggtggagcgagggagagcttggaagcctccggcttctcttgccctgtgttcgcgcagttgcgattctatggtgtcttgctatgcaagcattctgtgtaaggcactgtggaaggagaaactgcataccttctggcatcataacagaatcagcttcctaccgagtgcatttcgaccgattcccattttagcttgtggaaatgacgattgtcgcatacacattttcgcacagcaaaatgatcagttccaaaaagtgctgagtctctgcgggcatgaagattggatcagaggcgtggagtgggccgcattcggacgtgatctgttcctcgcgtcgtgctcccaggattgcctaatccgaatttggaaactgtatatcaagtcaactagcctggagacccaagacgatgacaacattcgcctgaaggaaaacacctttaccatagagaacgagtctgtcaagatcgcgttcgcagtgacacttgagactgtccttgccggtcacgaaaattgggtcaacgcggtgcattggcaaccggtcttttacaaggatggagtgctgcaacagcctgtgaggcttctcagcgcctccatggacaagactatgatcctgtgggccccagacgaggaatcaggggtttggttggaacaggtgcgtgtgggggaggtgggtggtaatactctcggtttctatgactgtcagttcaacgaagatggcagtatgattatcgcccacgctttccacggggcactgcatctatggaagcagaatacagttaatccccgtgagtggacccccgaaatcgtgatatcaggccatttcgacggtgtacaagatcttgtctgggatccagagggagagtttattatcacagtaggaactgaccagactactcggttgttcgcaccatggaaacgtaaggaccagagccaggttacatggcatgagattgccagaccacagatccacggctatgacctgaagtgccttgccatgatcaataggttccaatttgtttccggggcagacgagaaggtgctgagagtatttagcgccccaagaaatttcgtagaaaacttttgtgcgattaccgggcagagtctgaatcatgtgctgtgcaaccaggattctgacctccccgagggcgcaactgtgcctgcgctgggactaagcaacaaggcagtgttccagggagatatcgcttcgcagccatcagacgaggaggagctgttaacatcaactggctttgagtatcagcaggtggcgttccagccatccatccttactgaaccaccaacagaggatcaccttctgcagaacacgctctggcccgaagtccagaagttgtatggccacggctacgagattttctgcgtgacctgtaatagcagcaaaactctgctcgcatccgcctgcaaggcagcgaagaaggagcatgctgccatcattctatggaacacaactagttggaagcaggttcagaatctggtgtttcactccttaacagttacccaaatggctttcagccctaacgaaaagttcctgctggccgtgtccagagataggacatggtcactgtggaagaaacaggataccatctccccagaatttgagccggtcttctcattgtttgctttcacaaataaaatcacttctgtacactcccgaatcatttggagttgtgattggtcccccgatagtaagtacttcttcaccggcagtagagacaaaaaggtagtagtgtggggagagtgcgactctacagacgactgtatcgagcacaatattggcccttgctctagtgttttagatgttgggggtgcagtaacggccgtgtctgtatgccctgtactccaccctagccagaggtacgtggtcgcagtaggcctcgagtgcgggaagatatgcctgtatacttggaagaagactgatcaggttcctgagatcaatgactggacccattgtgtagagacaagtcaatcacagtcccataccctggccattcgcaagctgtgctggaagaattgttccgggaagactgagcagaaggaggccgagggggcagagtggcttcacttcgcatcctgcggtgaggaccacactgttaaaattcaccgcgtgaacaagtgcgcactgtag

SEQ ID NO: 30431 - DNA, 573 bp, synthetic construct
  source 1..573: mol_type = other DNA; note = Synthetic coding sequence
atgggcccactgccccgaaccgtggaacttttttatgacgtgctgagcccatattcatggcttggctttgagatactttgcagatatcagaatatctggaacatcaatctgcaactgcggccttcacttatcacgggtatcatgaaggactcaggcaataagcctcccggtctgcttcccaggaagggcctctatatggctaacgatttgaaactgctgagacatcatctccaaatccctattcacttcccaaaggactttctttctgttatgctggagaagggttctctatccgcaatgcggtttttgaccgccgtcaacctcgagcatcctgagatgctggagaaagcttcccgggagctatggatgcgcgtgtggagcaggaacgaggatattactgaacctcagtctatcctcgctgcagcagagaaggctggaatgagtgctgaacaggcccagggtcttctcgagaagattgctacccctaaggtcaagaatcagttgaaagaaaccacagaagccgcatgcaggtacggcgagagaagtggatgggcattgtaccttcaaccgtag

SEQ ID NO: 30432 - DNA, 1482 bp, synthetic construct
  source 1..1482: mol_type = other DNA; note = Synthetic coding sequence
atgatgaaaagacagctgcataggatgaggcaactcgcacagacgggctcccttggccgtacacctgagactgccgagttcctgggggaagatctactccaagtggaacaacggttagagccggctaaaagagcagcccacaatatccataagcgactccaggcctgtctccagggtcagagcggagcggacatggacaaaagagtgaagaagctcccattgatggccctgtcaactactatggcggagtcattcaaggagctggacccggatagttccatgggcaaagcactggagatgtcctgtgctattcagaatcaattagcccgtatcctcgctgaatttgagatgaccctggaaagagatgtcctgcagcctctttcacggctctccgaggaagaactccctgctatcttaaagcacaagaagtctctccagaaacttgtatccgattggaacaccctcaagagcagactcagccaggcgacgaaaaatagcgggtcctctcaaggtctgggtggatcacctggatctcacagtcataccacaatggccaacaaagtggaaacgcttaaggaggaagaggaagaactgaaaaggaaagttgaacaatgccgagacgaatatcttgccgacctctaccatttcgtgaccaaggaagacagctatgccaactacttcatccgtctgcttgaaatccaggcggactatcaccgcagaagtctgagcagcttggataccgcccttgctgagctacgcgagaatcacgggcaggctgatcacagtccttcaatgactgcaacgcacttcccacgggtgtatggggtgtcactggcaacccatcttcaggaactgggtagagagattgcactgccaatcgaagcctgcgtgatgatgctgttgtctgaaggaatgaaggaggaaggtctattccgcctggcagccggagcatcagtcttaaaaagactgaagcagacgatggcgagtgacccccactccttagaggaattctgtagcgatccgcacgccgtggctggagcccttaaatcatatctccgggaactgccagagcccctgatgactttcgatctttatgatgattggatgcgggcagcctcgctgaaggaacctggtgccaggctgcaggctctccaggaagtgtgcagtcgtctgccgccagagaacctctctaatctgaggtatctgatgaagttcttagccaggctcgcagaggaacaggaagtaaacaaaatgactccatctaacatcgcgatcgtactgggtccaaacctgctctggccaccggagaaagagggtttggagtattccggtgccatcagtgcacactgcaacctacgactgcccggatcctctgacagctcagcttctgcatgccaagtggcagggactaccggaacccggccttcttggatgcagccgccatgcctcccaagtagatggtgggcttcttccaggaggtag

SEQ ID NO: 30433 - DNA, 45 bp, synthetic construct
  source 1..45: mol_type = other DNA; note = Synthetic coding sequence
atggctatggctccttcgccttcattggtgcaggtctatacctag

SEQ ID NO: 30434 - DNA, 828 bp, synthetic construct
  source 1..828: mol_type = other DNA; note = Synthetic coding sequence
atgtctgccgaagtgaaagtgaccggccaaaaccaggaacagtttctgctgctagcaaaatccgctaaaggcgctgctttagcaacactgattcaccaggtcctcgaggcccctggcgtgtatgtgttcggagaattattagatatgcccaatgtgagagagctggctgaatcggacttcgcttccacattccggttgctgaccgtgtttgcatatgggacgtacgctgattacttggctgaagcccgaaacttgcctcccttgactgaagcccaaaaaaataagctgagacacttgtctgtggtcacactggcggcaaaggtcaaatgtattccatatgctgtgttgctggaggccctagcgttgagaaatgtgagacagcttgaggacctagtaatcgaggctgtgtatgcggacgtgttgagggggtctttggaccagcgcaatcagaggctggaagtcgactacagcattggcagagatattcaaagacaggatctcagtgccatcgcaagaaccctccaggaatggtgtgtcgggtgcgaggtggtcttgtctggtatcgaggagcaggtttcacgggctaaccagcacaaagaacagcagctgggtctcaagcaacagattgaatctgaggttgctaatttgaaaaagacaattaaagtgacgaccgcagccgctgccgcagccacgagtcaggatcctgaacagcacttgaccgagctccgggaacccgctcccggaacgaatcagagacagccctctaagaaagctagcaagggtaaaggcctaagaggcagtgccaaaatttggtcgaagagtaactag

SEQ ID NO: 30435 - DNA, 1506 bp, synthetic construct
  source 1..1506: mol_type = other DNA; note = Synthetic coding sequence
atggccgctcccgaaccggctccaaggcgggctagagagagggagcgcgaacgagaagacgaatcagaagacgagtcagatatcctcgaggagagtccttgtggtcgctggcagaaaagacgggaacaagtgaatcagggaaatatgcccggtctccagtccacctttctggccatggacacagaggaaggagttgaggtcgtctggaacgagctacactttggcgacaggaaagccttcgctgctcacgaagaaaaaatacaaaccgtgtttgagcaactcgtgctggtcgatcatcctaacatcgttaaactgcataaatattggcttgatacttctgaagcttgtgctcgggtcatttttatcaccgaatatgtatcctccgggagcctgaagcaatttctgaaaaagaccaaaaagaatcacaaggcaatgaatgcgagggcatggaaacggtggtgtacccagattttatctgccctctccttcttgcacgcgtgttcaccccctatcattcacggtaatcttaccagcgatacaatctttatccagcacaacggtctgatcaagataggctcagtgtggcaccgcatattctctaacgcacttccagacgatctgaggtctccaataagagccgagagagaggagttgaggaatctccacttcttcccaccagaatatggcgaagtggccgatggaactgctgtggacattttcagctttgggatgtgcgctctggagatggcggtgctggagattcaaactaacggcgacactcgcgtcacagaagaagccatcgcacgagcacgccattcgctgagtgacccaaatatgcgagaatttatcctgtgttgcctggcgcgagatcccgcacggaggccgagcgcacattctctgctgtttcacagagtgctgtttgaagtgcactccctaaagttactcgcagcgcactgcttcattcaacaccagtacctcatgccagaaaacgtagtcgaagaaaagaccaaagctatggacctacatgccgtgttagccgagctgccgaggcctaggcggcctccactgcaatggcggtacagcgaagttagctttatggagctggacaagttccttgaggatgtgaggaatgggatttaccccctaatgaactttgcggctactagacccttagggctgccacgggttttagccccacctcctgaggaagtccagaaagctaaaaccccaacgcccgaaccattcgatagcgaaacgcgaaaggttattcagatgcagtgtaacctcgaaaggtcagaagacaaggcacgatggcatttaactctcctgctggtcctcgaggacagactccacagacagctgacctatgacctgctgcctaccgactcggctcaagatctcgcatcagagctggttcattacgggtttctccatgaagacgataggatgaagttggccgcatttctcgagtctaccttcttgaagtatagagggacccaggcatag

SEQ ID NO: 30436 - DNA, 36 bp, synthetic construct
  source 1..36: mol_type = other DNA; note = Synthetic coding sequence
atgactgcaccttcctgtgccttcccagtacaatag

SEQ ID NO: 30437 - DNA, 534 bp, synthetic construct
  source 1..534: mol_type = other DNA; note = Synthetic coding sequence
atgcttttggacaagaatgtccccaatccaaggataaagttaatcgacttcggaatcgcccacaagatcgaggctggaaacgagtttaagaatatcttcggcacaccagaatttgtggcacccgagatagtcaattacgaaccgctcggtctagaagccgacatgtggagcattggggttatcacttatatattgttatcaggggcatccccctttcttggcgagaccaagcaggaaactctaaccaacatctccgccgtaaactatgatttcgacgaggaatatttcagtaacacctcggaacttgcaaaggactttattcgcaggctgctcgtaaaggacccgaagcgcaggatgaccatcgctcagtcgttggagcacagttggatcaaggccatcaggaggcggaacgtcagaggggaggattctgggaggaagcccgaaagacgcaggctgaagactacaagattgaaagagtacacaattaagtctcactcgtcagcctcacccattgtggcccctgtggatgcttag

SEQ ID NO: 30438 - DNA, 615 bp, synthetic construct
  source 1..615: mol_type = other DNA; note = Synthetic coding sequence
atgggcgacaagaagtctccaactaggcctaagaggcagcctaagccttcgtccgatgaagggtattgggattgcagtgtgtgtacctttcggaatagtgccgaagcatttaagtgcatgatgtgtgatgtgagaaaggggacttccaccagatcaactttgtttgaagtcattgtcagcgcaagccgaacaaaggaacctctgaaatttcccataagtggacgcaaacccaggcccgtttcccagttggtggcacaacaggttacacagcagtttgtacctcctacacagtcaaagaaggaaaagaaggataaagttgaaaaagaaaaatccgagaaggaaaccacaagtaaaaaaaattcgcacaaaaagacacgacccagactcaaaaacgtggatagatctagtgcacagcacctcgaagtgacggtgggggatcttaccgtcatcatcaccgattttaaggagaaaacgaagtctcctccggcatccagtgccgcaagcgcggaccagcacagccaatccggatcttcaagtgacaatactgagcggggtatgagccggtctagttctccgagaggcgaagccagcagtttgaatggtgagagccactag

SEQ ID NO: 30439 - DNA, 1350 bp, synthetic construct
  source 1..1350: mol_type = other DNA; note = Synthetic coding sequence
atgatgcttggaaccgaagggggtgaagggtttgtggtgaaagtcagaggtctgccctggagctgctccgcggacgaggttcagcgatttttttcggattgcaaaattcagaacggcgctcagggcattaggttcatttatactagggaaggaaggccaagcggcgaagcctttgtcgaactggaatcggaggatgaagtcaaactggcccttaaaaaggacagggaaacaatgggacacaggtatgttgaggtgttcaaaagcaacaatgtggagatggattgggttctgaaacatacaggccctaatagccctgatacggctaacgacgggtttgtgcgactgaggggtttgccgttcgggtgttcaaaagaagaaatagtgcagtttttcagtggcctcgagatcgtcccgaatggcattacgctacccgtggattttcagggcaggtccaccggggaagccttcgttcaattcgcctctcaggaaattgctgaaaaggccctgaagaagcacaaggagagaatcggccatcggtacatcgaaatatttaaaagtagcagggctgaagttcgcactcactatgacccaccaaggaaactcatggctatgcagagacccggtccatacgaccgtccaggggctggccgaggatataatagtatcggtcgcggtgctgggttcgagcgtatgcggagaggcgcttacgggggaggatatgggggatatgacgactacaatgggtataatgatgggtacggttttggatcggatcggtttggtagggacctgaactactgcttttctggcatgtcagaccatagatacggagacggaggatcgacctttcagtcaactaccgggcactgcgtccatatgagaggactgccttatagagccaccgagaacgacatttataacttcttcagccctctgaacccagttcgagtgcacatcgaaattggaccggacggacgggtgactggagaggcagacgttgagtttgcgacacacgaagatgccgtagcggctatgtctaaagataaagctaatatgcagcatcgctacgttgagctgttcctgaactcaaccgccggagccagcggcggagcatatgaacaccgctacgtggaactttttctgaactcaactgctggagccagtggcggagcttatggaagccagatgatggggggtatgggcctgagcaatcagagcagttatggtgggccagccagccagcaactgtcaggcggttatgggggagggtacggcggacagtctagtatgagcggatacgaccaggtactgcaggagaattccagcgatttccagtccaatattgcctag

SEQ ID NO: 30440 - DNA, 153 bp, synthetic construct
  source 1..153: mol_type = other DNA; note = Synthetic coding sequence
aaaacaggactgacaggcagcccttcttccctgtgggatctgctgagagaaatgttcgttgtctgctccaaggagcagctacagtccggcggaaagtacagccatcaggtttgggcgcctttttcgcccttggccagcggcgcagctttttag

SEQ ID NO: 30441 - DNA, 4386 bp, synthetic construct
  source 1..4386: mol_type = other DNA; note = Synthetic coding sequence
atgcagcgagagttagtgtacgcacgcggagatgggcctggcgctcccaggccagggtcaacagctcatcctccccacgccatccctaactcgcccccatccacccccgtaccccatagtatgccgccatctccctctcggatcccctacggtggcaccagatctatggtggtccctggtaacgccacaatcccacgcgacaggatctcttctttgcccgttagcagaccaatctcgcccagcccttcggcaattcttgaacgccgtgacgtcaagccagacgaggatatgtccggaaagaatatagcaatgtacagaaacgaagggttttatgccgacccttacctctaccacgaggggagaatgtcgattgcctcatcgcacgggggacaccctcttgatgtgccagatcatattatcgcatatcaccgcaccgcaattagaagtgcttctgcatactgtaaccctagcatgcaagccgagatgcatatggagcagtcactgtataggcaaaaatccagaaagtacccagacagtcacctgccaaccctgggctcaaagaccccacccgctagtccacacagagttagtgatttgcggatgattgacatgcacgctcactataatgctcacgggccaccccacactatgcaacctgatcgcgcttctccttcgaggcaggcgttcaagaaggagcccggaactctcgtgtacattgagaaacctcgatccgccgctggtctctccagcctggtcgacctgggtcctccactgatggagaagcaagtgttcgcgtattctaccgctactatcccaaaggacagagaaaccagtgagaagatgatgaaaactaccgccaaccggaaccacacagacagcgcgggtactcctcatgtttctggagggaaaatgctttctgcactcgagagcaccgtccccccttcgcagccgccaccagttgggactagcgcaattcacatgagtctgctcgaaatgcgtagatctgttgccgaacttagactgcagctccaacagatgaggcagctgcaattacagaatcaggagctgctccgtgcgatgatgaagaaagccgagttagaaatttcaggaaaggtgatggaaaccatgaagaggctagaagatcccgttcaaaggcagagggtcctcgttgagcaggagcgacagaagtacctccatgaggaagagaagatcgttaagaagctctgcgaactggaggacttcgttgaagatcttaaaaaagatagtacggctgccagccggttggttacgcttaaggatgttgaggacggtgcctttctccttcgacaagtgggggaagccgtggctacactcaagggggagttccccactctccagaacaaaatgagagcgattctcaggatagaggttgaggccgtaagatttttgaaggaagaaccccataagctcgactccctgcttaaacgcgtcaggtccatgaccgacgtgctgacaatgctgcgcaggcatgtaactgacggactcttgaaaggaaccgacgctgctcaggccgctcaatatatggccatggagaaagcaaccgccgctgaggttctaaagagtcaggaggaggcagctcatactagcggtcagccattccactccacaggcgcacctggcgacgctaaaagcgaggtggtccccctcagtggcatgatggtgagacatgctcagtcctcccctgtggtgatccagccctcacagcatagtgtggctcttttgaatcctgcccaaaacttaccccacgtggccagttcacccgctgtgccccaagaggcaaccagcactctccaaatgtcacaggctccacagagcccacaaatacccatgaacggtagcgccatgcagagcctattcatcgaggaaattcattccgtctctgctaaaaatcgtgccgtctccatcgaaaaggcagagaaaaagtgggaggaaaaacgccagaaccttgaccactataacgggaaagaattcgagaaactgcttgaggaggctcaggctaacatcatgaagagcattccaaatctggagatgccacccgctacgggccctcttcctagaggcgatgcgcctgtcgacaaagtcgagttgagtgaagacagtccaaattcagaacaggaccttgagaagctgggaggcaaatccccacctcccccacctccacctccccgacggagttacctgcccggttctggactgaccaccacgaggtccggcgatgtcgtgtacaccgggcgtaaggaaaacattaccgcaaaggcctccagtgaagacgccggacccagcccccaaaccagagccacgaaatatcctgccgaggagccagcctctgcctggacgccctcaccaccaccagtgactacctcatcctctaaggatgaggaagaagaagaagaagagggtgataagataatggcagagctgcaggcatttcagaaatgttcattcatggacgtgaactcgaatagccacgccgaaccctctcgcgcagactctcacgtgaaagacacgcgtagtggagcaaccgtgccccctaaggagaagaaaaacctggagttctttcatgaagacgtgagaaaatccgacgttgaatacgagaacggcccacagatggagtttcagaaggtaaccacaggggcagtcaggccgagtgaccctcccaagtgggaaagggggatggagaacagtatttccgacgcatctagaacatccgaatataagaccgagattatcatgaaagagaactctatttcaaacatgagcctcctgcgggattccaggaattacagtcaagagaccgtacctaaagcttcgttcggcttttccggaatctcaccactggaggacgagatcaacaaaggcagcaagattagcggtcttcagtactcgattccagatacagaaaaccagacactcaattatggaaaaaccaaggagatggagaagcagaacacagataaatgccacgtgagctcccatacccgcctaacagagagctcagtgcacgacttcaaaactgaggatcaggaggtcataactacagacttcgggcaggtagtgcttcgaccaaaagaagcgcgacacgcaaatgtgaaccccaatgaagacggagaaagctcctcgagttcccccaccgaggagaacgctgccaccgacaacatagcttttatgatcacagagacgaccgtgcaggtgctgagttccggcgaggtgcatgatattgtaagccagaaaggggaagacatccaaaccgtgaatattgacgctaggaaggagatgacaccacgacaggaggggaccgacaatgaagacccagtcgtgtgcctggataagaagcctgtgatcatcatctttgacgaaccaatggatatccggagcgcttacaaacggctctcaacaatttttgaagagtgtgacgaagagcttgagaggatgatgatggaggaaaagattgaagaggaagaagaggaggagaacggagacagtgtggtccagaacaacaatacctctcagatgtctcacaagaaagtcgccccaggcaaccttcgtacgggtcagcaggtcgaaactaaatcccagcctcacagcttggccacagaaacccgcaatccaggaggtcaagagatgaaccggactgaactgaacaagttcagccacgtggatagtcccaatagcgaatgtaagggcgaagatgccacagacgaccagtttgagtcaccgaaaaaaaaatttaagtttaaatttccaaaaaagcagttggccgcactcacccaggccattagaactggcaccaagacaggaaagaaaaccttgcaggttgtggtctatgaggaggaagaagaggacggcacgttgaaacagcacaaggaagccaaacgctttgagattgccagatctcaacccgaggatacccctgagaacaccgtgcgcagacaagaacagccatcaattgagtcaaccagcccgattagtagaacagatgaaatccgaaaaaacacgtaccgcacactagattctttagaacagaccatcaagcagctcgagaatacgatcagtgagatgtccccaaaagctctggtcgatactagctgcagctcaaatagggattcagttgcatcctcttcccatattgctcaggaagcctcgccccgacccttacttgttccggacgaggggccaacagcactcgaacctccaacaagcatcccttccgcatcaaggaaagggtcctcaggcgcaccacagacatcccgaatgcccgtacctatgagcgcaaaaaacaggcctggtactcttgacaagcctgggaagcagagcaaacttcaggatcctcgccagtatcgccagtag

SEQ ID NO: 30442 - DNA, 2118 bp, synthetic construct
  source 1..2118: mol_type = other DNA; note = Synthetic coding sequence
atgctaaccctactggctgaagatcgggctgtgccaagcgccccaaccggaccagggcctctgcttgagtttgctttgcatgaagatctcctgacccgcgttttaacgtggcagctgcaatgggatgaactaggtgatggagttgaggagcgtcgggcagagcaactcaaactcttcgaaatgctagtctctgaagcccgtcagccgctgctccgtcatggccctgtgcgtgaggcactgctgacactattggacgcatgcgggagaccggtgccctcttctccggcactggacgagggcctcgtgctgttgctcagccaactgtgcgtgtgcgtcgctcaggagcccagtcttctggaatttttcctacaaccgcctccagagcctggtgccgcaccacggctgctattattctctagactcgtcccattcgtacatagggaagggactctcgggcagcaagctagagacgcactgctgttattaatggctctgagtgcaggaagtcccaccgtaggacggtacatcgcagaccattcctatttctgccctgtcctggctacgggtctttccgccttgtattcaagcctcccaaggaaaatagaggtgccaggtgatgactggcactgccttaggagagaagattggctgggagttcccgcactggccctcttcatgagctccttggagttctgcaacgctgtcattcaggtcgcacaccccctcgtgcagaagcagctggttgattatatccataacggtttccttgtccccgtcatgggtccggctctccacaagaccagtgtggaagaaatgatcgctagtaccgcctacctagagcttttcctccgctccatttcggaaccagccttgttgcggactttcttgaggttccttttgctgcatcgacacgacacacacactatcctcgacactctcgtggcgagaattggatctaacagcaggttgtgcatggtgtcactgtccctgttcagaacgctattgaacctaagctgcgaggacgtgttgctccaactggtgctccgctatctcgtgccatgtaaccatgtgatgttaagccagaagcctgccgttagagatgttgatctgtacggcagggcagctgataaatttctcagtctgattccaaggtgctgtagacaccatgcgccttcgccccctagaccagagcatgccagttgggcccgtggtccgggtagcccatccgtcgacagctcgtcggtcacaaccgtcccacgacccagcacaccaagccgactggcattgtttcttcgacagcaaagcctcgggggatcagagtcacctggaccagccccatgttcacccggtctgtcagcaagcccagcctcttcaccagggaggcgcccaacccctgccgaagagcctggcgagctggaggacaattacctcgagtacttgagagaggccaggcgtggagttgaccgttgcgtcagagcttgcaggacgtggtctgctccatacgacggggagaggcccagtccagagccttctcccttcggttcacgaactaagaagcggtctctactgcctgaagaggatagaaataacgtgggtgaaggggaagaggaggagcttgggaggagaggtcgggctggcggtgctggcgagggacccggtcatctgccacctccacagctcaacggcgtccccggaagttggccggagggggctaaaaaagtgagactggtgcctaaagagggcgctggagaactgctggagggcatctccgagggcatggccggactagaaggcttcggacaagaattgagagagctggaagtagctctttctaacggcggaaccggctccgagtcacccctcgagcccccactccctctggaagaggaagaagcctatgaatccttcacttgtcctccagaaccccctggcccattcttgtcttcaccgctgaggactctcaaccagctcccaagccagccattcaccggacctttcatggccgtgctgtttgcaaagctggaaaatatgctccagaacagcgccctcagctgcagtacaccgacatggagtagctccccagtttcttccccttgctgcagatgttgggcactgtag

SEQ ID NO: 30443 - DNA, 804 bp, synthetic construct
  source 1..804: mol_type = other DNA; note = Synthetic coding sequence
atgatgaggggatatattaaaaaggtccttaaaaatacctcctatcatgtaaatcaatacctgttcatacaacacgggtggtccgggtctggagaccagtctgtcttgtactcttgcaacctcatgcggatggtcacccggaccaaaaaaatttttgtcgggggactgtccgcaaacacggtggtggaggacgtaaagcagtattttgagcagtttggcaaggtggaggatgctatgctcatgttcgataagaccacaaatagacaccggggatttggcttcgtgactttcgaaaacgaagatgtcgtggaaaaggtctgcgagattcatttccatgaaatcaacaataagatggtcgagtgtaagaaggctcaacccaaggaagtaatgtttcctccaggtaccagaggtagggccagaggtctaccatataccatggacgcctttatgctgggtatggggatgctgggataccccaactttgtcgctacatacgggagaggctacccaggattcgcccctagctacgggtaccaatttcctggcttccctgctgccgcttatgggcctgtggccgcagccgctgttgcggctgccagagggagcgggtctaatcccgctcgccctggcggttttcctggcgctaattcgccgggtccagttgcagatctgtacgggcctgcttcccaagatagtggggtgggaaattatatatctgcagcaagccctcagcctggaagtgggttcggacacggtatcgccggaccactcattgctacagccttcacgaacggctaccattag

SEQ ID NO: 30444 - DNA, 483 bp, synthetic construct
  source 1..483: mol_type = other DNA; note = Synthetic coding sequence
atgtcttctccattggcctccctgagtaaaacgcgtaaggtgccactacccagcgagcctatgaatccaggacgtagagggattagaatttacggggatgtacccgcatcccacgactctgaacttatggcattcatgacccgtaagctgtgggatttggagcaacaggtgaaagcccagaccgatgaaatcttaagtaaggatcagaagattgcagcactggaagatctggtgcaaaccctgaggccacatccggctgaagcgactttacagcgtcaggaggagctggaaaccatgtgcgtgcagctacagcgccaggttcgggagatggaacggttcctttccgattacggcctgcagtgggtgggtgagccaatggatcaggaggatagcgagagcaagactgttagcgagcatggcgagcgagattggatgacagctaagaaattctggaagcctggtgggctcatcggggcaccttag

SEQ ID NO: 30445 - DNA, 462 bp, synthetic construct
  source 1..462: mol_type = other DNA; note = Synthetic coding sequence
tgaagcgtccagtcccccgctcagcagcaggtacctgccagacccggtgctccctcagtgcaagtgccgtcaccttttttattgcagaaccagtacgaaccagtgcagcctcactggttttactgtaaagaggtggagtataagcaactgtggatgcccttcagtgtattcgattcattgaacctggaagaaatatacaacagcgtccagcctgacccggagtctgttgtgctgggcactgatggcggaaggtacgatgtgtacctgtacgatagaattaggaaagctgcatattgggaggaggagcccgctgaggttcggagatgtacgtggttttacaagggagacaccgattccagatttataccatatacggaggaattttctgaaaagctcgaggttcgggtgctgtacttcttcatgagcttcttcaagaagtgccgatcctatatccattggtag

SEQ ID NO: 30446 - DNA, 1062 bp, synthetic construct
  source 1..1062: mol_type = other DNA; note = Synthetic coding sequence
atggagcaggaactggaacagcttgctcaactgccttcaagtaagaatagtctgcttaaagacgccatggcccctgggacaccaaagtcactactgctgagcgccagcatcaagagagagggcgagagtccaacagccagcccccactcatcagctaccgacgatctgcaccactcagacaggtatcagacgttcctgcgtgttagagcgaaccgccagacccgccttaacgccagaattggtaagatgaagagaagaaagcaagacgaaggccaagtgtgtcctctttgtaacagaccactcgccggatctgaacaagaaatgagtcgccatgtagagcactgtcttagcaagcgcgaggggagttgtatggctgaggacgacgctgtggatattgaacatgaaaacaacaacaggttcgaggaatatgagtggtgcggccaaaagaggataagggcaactacactgttggaaggaggcttccgcggatccggttttataatgtgctcagggaaagaaaacccagactctgatgccgacttggacgtggatggagacgacactctggaatatgggaagcctcagtacaccgaggctgatgtaattccttgtacaggcgaggagcctggcgaggctaaagaacgagaggcgctgcgtggcgcagtgttgaatgggggacccccatcaactcgaatcacccccgaattttccaaatgggcttcagatgaaatgcccagcactagcaacggtgaatcctccaagcaggaagccatgcagaagacctgcaagaattcggatatcgaaaagatcacggaggacagtgctgtaactaccttcgaggcactgaaagcgagggttcgagagttagagcggcagctgagtaggggggacaggtacaaatgcctgatctgcatggactcatactctatgccgctgacgagtatccagtgctggcacgttcattgcgaagaatgctggttgcgaacattaggagccaagaagctgtgtccgcagtgcaatacgatcaccgcgcctggtgatctgagaagaatctatctctag

SEQ ID NO: 30447 - DNA, 1782 bp, synthetic construct
  source 1..1782: mol_type = other DNA; note = Synthetic coding sequence
atggagaagctgtccgcccttcaggagcagaagggggagttacggaaaagactctcatacactacgcacaagttggagaaactggaaaccgagtttgattctacaaggcattatctcgagatagaactgaggagagcccaggaggaactcgagaaggtgaccgagaagctgcgcaggattcagtccaattatatggctctacaaagaattaaccaagaattggaagacaagctgtaccgcatgggacagcactacgaagaggaaaagcgagcgctgtcccacgaaatagttgctttgaactcacacttacttgaagcaaaggtgactatcgacaagctgtctgaagataacgaactgtataggaaagactgcaacctggcggctcagctgcttcaatgctcccagacctacggcagggtccacaaggtgagcgaacttccatctgattttcaagagcgggtgtctttgcacatggagaagcacggatgttctctgccttctcccttgtgccaccctgcttatgccgattctgttccaacctgcgttattgccaaggtgctggaaaaaccagaccccgcatccctttcaagcaggctaagtgacgcatctgcaagggatctggccttttgtgatggcgtggagaagcccggaccaagacctccctataagggagatatctactgctcagatacagccctttattgtccagaggagcgccgaagggacaggcgcccaagcgttgatgctcctgttactgacgtcggatttcttcgagcccagaactcaaccgacagcgctgctgaagaggaggaagaggccgaggcagccgcttttcccgctggcttccagcatgaggcttttccctcatatgcgggttccctgccaacatcttcgagctactcatcatttagtgccaccagcgaggagaaagagcatgctcaggcatctaccttgacggcttcccaacaggctatttatttgaactcccgggacgaactgtttgaccgaaaacccccagccaccacatatgagggatctcctaggttcgcaaaggccactgcggctgtggccgcacccctcgaggccgaagttgcaccaggattcggcagaactatgtcaccctacccggctgagaccttcaggttccccgcttcccccggacctcaacaagccttgatgcctccaaacctgtggagcttacgggctaagccaggcacagccaggctccccggagaggacatgaggggtcaatggcgccctctttcagtggaagacatcggagcttactcgtatccagtgagtgcagcagggcgagcgagtccctgctccttcagtgaacgctattatggcggagctggtggatctcctggcaagaaagccgacggccgtgcttctcccctttatgccagttacaaagctgactctttcagtgaaggtgacgatctgtctcaaggacatctggccgagccttgtttcttgagagccggtggagacctcagcctctccccaggcagatcagcagaccccctgcccggttatgccccttcagaaggcggtgacggggacaggctgggcgtccagttgtgcggtacggctagctccccagagcccgagcagggaagtcgcgattccctcgagccaagttcaatggaagccagtccagaaatgcatcccgctgctagactctcccctcagcaggcgttccccagaacaggtggatccgggctcagccgcaaggacagcctgacaaaggcacagctttatggcactttgcttaactag

SEQ ID NO: 30448 - DNA, 363 bp, synthetic construct
  source 1..363: mol_type = other DNA; note = Synthetic coding sequence
ctggccctccagattagcgaaaatctgttctccaacaaggtgctcaatgcacttaaacccgagaaggacgtggatggggttacagacatcaatctggggaagctcgtaaggggcgatgcccacgaatgctttgtatccccggttgccaaggctgttatagaactgctggaaaagtccggtgtgaacctcgacggcaagaagattctggtggtgggcgctcatgggtccctcgaggcggctctgcagtgcctattccagagaaagggtagcatgacaatgtccattcagtggaaaacccgacagctccagtccaagacggagagccgctctgtaactcgcctggagtgtcggagggtcatctag

SEQ ID NO: 30449 - DNA, 1167 bp, synthetic construct
  source 1..1167: mol_type = other DNA; note = Synthetic coding sequence
atgtctggcactttcttaatccgaaaaccccagctgctgcagggcgtctatgccatggggttcaacaggcccagtaaaattcaggagaatgccctcccaatgatgttagcagaacctccccagaacctaatcgcccagtctcaatctggtactggaaaaactgcagcgtttgtacttgctatgctgtctcgcgtggagccctcagaccgatacccccagtgtctgtgccttagtccaacatacgaactcgccctgcaaacaggcaaggtgattgaacaaatgggcaaattctatccagagctgaaactggcctacgccgttagagggaacaagctcgaacgtgggcagaagatcagcgagcagatagtgattggcacccctggaactgtgctggactggtgttccaagctgaagttcattgaccccaaaaaaatcaaggtgttcgttctcgatgaagccgacgtcatgatcgctacacagggccaccaggaccaaagtattaggattcagcgaatgctcccccgtaactgtcagatgctgttattttccgcaacattcgaagattccgtctggaaattcgcccagaaagtagtgccagatccaaacgtgattaagttgaaacgggaagaagagaccctggacactatcaaacagtattatgtgctgtgcagcagcagagacgagaagttccaggccctgtgtaatctgtatggcgctataaccatcgcacaagctatgattttctgtcataccagaaaaactgcttcttggctggccgcagaactaagcaaagagggccaccaggttgccttgctgagcggcgaaatgatggttgagcagcgggctgctgtcattgaaagattccgggagggaaaggaaaaagttctggtgacaactaatgtgtgcgcacgcggaatcgatgtggagcaggtgtccgtggtcattaacttcgatctcccggtcgataaggacgggaacccagacaacgagacttatctgcatagaattgggaggacagggaggtttgggaagcgcggtctcgccgtgaatatggtggatagcaaacatagtatgaacattctgaatcgcattcaagagcattttaataagaagatagagcgcctggacaccgatgacttggacgaaattgagaaaatcgccaactag

SEQ ID NO: 30450 - DNA, 1821 bp, synthetic construct
  source 1..1821: mol_type = other DNA; note = Synthetic coding sequence
ctgcggcaatgttataactataattgcccaagctttcttgctgccgcattggcacgggcaacaagcgatgaggttctgcagagcgacctgagtgcgcattatatccccaaagagaccgatggcacagaaggcactgttgaaattgagacagttaagctggctcgcagtgtcttctcgaagttgcacgagatttgttgctcctgggtaaaggattttcctctacgacgccgtcctcagctatactacgaaaccagtattcatgctattaaaaatatgagaaagctcttctacaaacacatctccaaaaagaagaaaaagcgcaaaaagagagattgggaccaggaagagcaggcttacttcgcagtgttcgacggtcacgggggagtggacgctgcgatttatgcgagcatacatctgcacgtcaacctcgtccgtcaagagatgtttccccacgaccccgctgaggctctgtgccgggcattccgtgtgactgacgagcgtttcgtccagaaggcagcaagggaaagtctgaggtgcggtacaacaggagttgttacttttataaggggcaacatgctccacgtggcttgggtaggtgactcgcaggtgatgttagtgcgaaaggggcaggcggtggaactgatgaagccccacaagcccgacagagaggatgaaaagcagaggatcgaggcactggggggatgtgtggtgtggttcggcgcatggagagtgaatggaagcttaagcgtcagtagagcaattggtgacgccgaacataagccctacatctgcggcgacgccgacagcgcatctacagtgctcgacggaacagaagactatcttattctggcgtgcgacgggttttacgacaccgtcaatcccgacgaggctgtgaaggtggtgagcgaccatttaaaagaaaacaacggcgattctagtatggtagcacataagctggtcgcttctgccagggacgccggaagctccgataatatcacggtcatcgttgtattcttgcgcgacatgaataaagccgtcaacgtgtcagaagagtcagattggactgaaaacagtttccagggaggtcaggaagacggaggagatgataaggaaaaccatggggagtgtaaaagaccatggccacaacaccagtgtagtgcacctgcagacctggggtacgatgggagggtcgactcctttaccgataggacttccctctctcccggatctcaaatcaatgttctcgaggatccgggatatctcgaccttacacagatcgaggcgagtaaaccgcattccgcccagttccttctgccagtggaaatgttcggtccaggtgccccaaaaaaggcgaacttgataaatgagcttatgatggagaagaaaagtgtccaaagtagtttaccggaatggtccggcgcaggcgaatttcccacagccttcaacctcggaagcacaggggaacaaatttatcggatgcagtctttgtccccagtttgttcagggctggagaacgagcagtttaagagccctgggaatagggtttctaggctgtctcaccttcggcaccactactctaagaagtggcaccgtttcagattcaatcccaaattctactccttcctgtccgcccaggagccatcacataaaatcggcacctccctgagcagcctgacaggcagtggaaagaggaaccgtatccgcagctcattgccgtggcgccaaaattcttggaaagggtactccgagaatatgagaaagcttaggaagacacacgatatcccttgtccagatcttccttggagctataaaattgaatag

SEQ ID NO: 30451 - DNA, 678 bp, synthetic construct
  source 1..678: mol_type = other DNA; note = Synthetic coding sequence
atggagaatttgttgcaagccactaaaagccacgtggacaaagtcataatgaagttgggaaagacaaatgcaaaggcagtatccgagatgcggcagaagatttggaataacatgcctaaggatcaccccgaccacgaacttatagacccattccccgtgcccctcgttattatcggctccaagtatgatgtgttccaggatttcgaaagcgaaaaaagaaaagttatctgcaagacactgaggtttgttgcacattactatggggcttccctcatgttcacaagcaaaagtgaggcacttctgttgaagatccggggtgtgattaaccagctggccttcgggatcgacaagtccaaatcgatttgcgtggatcaaaacaaaccccttttcatcacggccggtctggactcattcggtcagatcgggagtccaccagttcctgagaatgatatcgggaagctgcatgcacactcccctatggagctatggaaaaaagtgtacgaaaagctgttcccaccaaagagcatcaacactctgaaggatatcaaggaccccgcacgggacccacagtatgcagaaaatgaggttgatgagatgagaatccagaaagatctggagttggaacagtataagcgctcaagctccaagagttggaagcagatcgagctggactcatag

SEQ ID NO: 30452 - DNA, 621 bp, synthetic construct
  source 1..621: mol_type = other DNA; note = Synthetic coding sequence
atgggcttcagtaatatggaggacgatggaccggaagaagaggagcgggtggccgaaccccaggctaactttaacactcctcaagccttacgttttgaagaactgctggcaaaccttctaaacgagcagcaccaaatcgccaaagagctctttgaacagctgaaaatgaagaagcccagcgctaagcagcagaaagaggtagaaaaagtcaagccacagtgcaaggaggtacaccagaccctcatcctggatccagcccaacgaaaaaggcttcagcagcagatgcagcaacatgtgcagttattaacccagatccaccttcttgccacatgtaacccgaacttgaaccctgaggcatcgagtactcggatctgcctgaaagaactcggaacatttgctcaatctagcattgccttgcatcatcagtacaacccaaagttccagacactctttcaaccttgtaacctcatgggcgctatgcagttgatcgaggactttagcacacacgttagcatcgattgttcgccacacaagacggtcaaaaaaacagcaaacgagttcccctgtctgcccaaacaggtggcctggatcctggccacatcaaaggtgttcatgtattag

SEQ ID NO: 30453 - DNA, 468 bp, synthetic construct
  source 1..468: mol_type = other DNA; note = Synthetic coding sequence
atgggcaaggattactacaagattctggggattccaagcggggctaatgaagacgaaattaagaaggcttaccggaagatggcccttaaataccatccagacaaaaacaaagagccaaacgcagaagagaaattcaaggagatcgcagaggcgtacgacgtgctcagcgaccccaaaaaacgaggattgtacgaccagtatggtgaagaaggactgaaaaccggcggaggtacatccggtggctcgtccggcagcttccactataccttccatggggatcctcatgccacctttgcctcctttttcggagggagcaacccatttgacatcttctttgcgtccagccgcagcacgagacccttcagcggtttcgacccagacgacatggacgtggatgaggacgaggatccatttggggcttttggacgctttggtttcaatgggttaagccggggtccaaggcgctag

SEQ ID NO: 30454 - DNA, 246 bp, synthetic construct
  source 1..246: mol_type = other DNA; note = Synthetic coding sequence
atgtcaattagcagcgatgaggtgaacttcctggtgtatcggtacctgcaagagtccggcttctcacattccgccttcacctttgggatcgaaagccatatctctcaaagcaacattaacggggcactcgtccctccagccgctctgatatccataattcagaagggcttgcagtatgtggaggcagaagtttccatcaatgaagatggtacattgtttgatggtaggccaatcgaatcactgtag

SEQ ID NO: 30455 - DNA, 1248 bp, synthetic construct
  source 1..1248: mol_type = other DNA; note = Synthetic coding sequence
atggccccagtaggggtggagaagaagcttcttctgggccctaatggtccagcagtggcagccgcaggggacctcacatcagaggaggaggagggccaaagcttgtggtcttccattctctctgaagtatcgacaagggctcggtcaaagctaccatccggcaaaaatatactcgtgtttggagaagacgggagcggcaagaccacactcatgaccaaactgcaaggagcagagcacggcaaaaaggggagagggctcgagtacctgtacttgtctgtgcatgacgaggatagagacgtggttaaggattttcaagactatatggaaccagaggaagggtgccagggatcaccacaaaggcgtggccctctcacgagtgggagcgatgaagagaacgtcgcccttccattgggggataacgttttgacccataatctcgggattcccgttttagttgtgtgtaccaagtgtgacgcagtctctgtgttggaaaaagaacacgattacagagacgagcatcttgattttatccaaagtcacctccgacgcttttgcttgcagtacggggctgctctgatatatacatcagtcaaagaagaaaagaacctggatctgctctataagtatatcgtgcataagacttatggcttccattttaccaccccggctctggtagtggagaaggacgcagtgtttatcccagccggttgggacaacgaaaagaaaattgccatactacacgagaatttcacaaccgtaaagccggaagatgcgtacgaggatttcatcgtgaagccgccagtaaggaagcttgttcacgataaagaactcgctgccgaagatgaacaggtgtttctcatgaagcaacagtccttgctggccaagcagcctgcgactcctactcgcgcttctgaatccccagcccgaggacctagcggtagcccacgcacccagggcagaggagggccagccagtgtgccatcaagtagtcccggaacatctgtgaagaagcccgaccccaatataaagaataatgcagcatcagagggtgtcttggcgtcctttttcaactccctcttgagcaagaagaccggatcccccggaagtccgggagctggaggggttcagtcgactgctaaaaagagcggacagaagaccgtgctgtccaacgtccaggaagagctcgaccgcatgacgcgaaagcccgattcgatggtgaccaacagttctacagaaaacgaggcttag

SEQ ID NO: 30456 - DNA, 1929 bp, synthetic construct
  source 1..1929: mol_type = other DNA; note = Synthetic coding sequence
atgcggtctatcacccaaggagcttgtcggttcatatgggaagacaagggctatatcagtggagaccacatcaacctcgtatccagctccctgagtagttttcctatccttcagcgcagctcggaagaaaagatcctatatagcgataggttgagcctggagaggcaaaagctgacagtgtgtcctatcatcaatggcgaggaccacctgcggctgttgaatttccagcataatttcatcacaaggatccagaacataagcaacttgcagaagctgatctcactggatctctatgataaccagatcgaggagatcagcggcctctctacactgcggtgtctgagggtactcctcttaggtaagaatagaatcaaaaagatttcaaatttggagaatctgaagagtctggatgtacttgaccttcacggaaatcaaatcaccaagatagagaatatcaatcacctatgtgagctaagggtcctcaatcttgctcggaactttctgagccacgtggacaatctgaacggcctggactccctcaccgaactgaacctccgccacaaccagattacattcgtgcgtgacgtcgacaacctgccatgcttacagcatctgttcctaagtttcaataatatttcaagctttgattcggtgtcctgcctggcagatagctcctctctgtctgatattacctttgacggaaacccaatcgcccaggagagttggtacaaacacaccgtgcttcaaaatatgatgcagctgagacaactcgacatgaagagaatcacagaggaggaaaggcggatggcctctgttcttgcaaagaaagaagaggagaagaaaagagaaagtcacaaacaaagtctgttgaaggagaaaaaaagactcacgataaacaatgttgccagacagtgggaccttcagcagcagagagtggctaacattgcaaccaacgaggaccgcaaagactcagacagccctcaagatccctgccaaattgacggaagcacgctgtctgctttccctgaggaaacagggcctttggattctgggctgaataatgctctgcagggcttatcagtgatcgatacttatcttgtggaagtagatggcgataccctgtccctgtacggcagtggcgctctagagagcctggatcgcaattggtcagtacagaccgcaggtatgatcacaactgtttcttttacgttcattgagttcgacgaaatcgtacaagtcctgccaaagctcaagataaaatttcctaattctttgcatctgaaattcaaggagacaaacttagtgatgctgcagcagttcaacgcactggcccagctccggcgtattgaccagctcacaatcgatccacaagggaatccagtggtgaatttcacgctgtggaagtactatgtgctgttccgactgtcacacttttcaatgcaaaaaatcaacggcactgaggtgactcaaaacgacatgatcatggccgagcgactgtttggcatcctagcacatgtagcctcttctgagttgccgcagtaccgtttgatctccatcctgggggatgcacgaaagaagcagtttcgctacctgctggaaagtaaaggaaagaaaccgggtatcatcaatgaggaaaataacgacagcaagagactcgtgggggagaacacaaaccgggcaacgctaaattacaccactcgcgacttttacaatgagaagctcgaagaaattaaagaaaagaagaagttctgcaagacctatatcgaagacctggttaaggaggccaccgagattaatatgaaaaatgaggccctacaaaaactttggccgcagatgttcatcgagctcgttcgggatgcggtgattgagattaggaataagaatagttatatgaagctgtgcctgcaacagattactgaccagaagtag

SEQ ID NO: 30457 - DNA, 432 bp, synthetic construct
  source 1..432: mol_type = other DNA; note = Synthetic coding sequence
cgactaggtcggtacgaagttgaaaaacgctgtgcagtggagaaggaagactacgacctagcaaaggaaaaaaaacagcagatggaacagtaccgggctgaggtttatgaacagctggaacttcacagccttctagatgccgagctgcactcggccgtcgacccactgctacctgccacagaccctcatccgaagatcaacgctgaaagcctaccgtacgacgaaaggccgctcccagcgatccggaaacactatggagaggcagtggtggagcccgaaatgtctaatgcagacatcagtgacgccagacggggtggcatgctgggcgagcctgagccactcacggagaaggccctgcgagaggcctcgagtgctattgatgtgttgggggaaaccttagtagccgaagcctattgcaaaacatggtcttag

SEQ ID NO: 30458 - DNA, 1842 bp, synthetic construct
  source 1..1842: mol_type = other DNA; note = Synthetic coding sequence
atggccaccatccctgattggaagctgcagctgttggcccgtcgaagacaggaggaggcttcagtgcgcggtagggaaaaagctgagagggaacgtctgtcccagatgccagcttggaagcgcggactgttggaaaggaggagggcaaaactcggcctgtcccctggcgaacctagtcctgttttaggaactgtcgaggctggtcctcctgatcccgacgagtctgctgtgctgcttgaggctattggtcccgtacatcagaaccgcttcataagacaggagagacagcaacagcagcagcaacagcagaggagcgaagaactcttagcggagcggaagccgggtccccttgaggctcgcgagcgacgacccagccccggagagatgcgggaccaatcccctaaaggcagagaaagccgagaagagcggctgtccccacgggagactcgggaaagaaggctgggcattggtggtgcccaggagctgagtttaaggcccttggaagcccgagattggcgtcagtccccaggagaggtaggagaccggagttctcggctctccgaggcctggaagtggaggctgagccccggagagaccccagaacggtcactccgtctggccgagtccagagagcagtcccctcgacgcaaggaggtggaatcccggctctctccaggcgagtcagcctatcagaaactgggacttactgaagcccataaatggcgcccagatagcagggaatcgcaagaacagtccttggttcagctggaagcaactgagtggcggctgaggtcaggggaagaaagacaggactatagcgaagagtgtggacggaaggaggagtggcctgtgcctggggtggcaccaaaggagactgctgaacttagtgaaactttgacccgggaagctcaggggaacagcagtgctggtgtggaggcagctgaacagcgccctgttgaggacggtgagagaggcatgaaacctactgaaggatggaagtggactctaaattccggcaaagcacgagagtggactccaagagacattgaggcgcagacacagaagcccgagccaccagagtcagctgagaaactgctcgaatcccctggagtggaagccggtgaaggtgaggcagaaaaggaagaggccggagcacaaggcaggcccctccgggcactgcagaattgctgctccgtgccgtcaccactccctcctgaggatgccggaaccggtggtctgcggcaacaggaagaagaagctgttgagctccagccccctcccccagcgcctctgagcccccctccgccagctccaaccgccccacagccccctggagatcctcttatgtcacgcctgttctacggcgtaaaagcaggtccaggtgtcggagcccctcggagaagtggccatacttttaccgttaatccaaggagatctgtccctcccgctacccccgctacccccacgtctcctgcaacagttgatgccgcagtccccggagctggcaaaaaaaggtacccaacggcagaggaaatcctggtgctaggcggatatttacggctgtcacgatcctgtctggcaaaaggcagcccagagagacaccataagcagctgaagatctcattcagcgagaccgcattggaaactacatatcagtacccgtccgaatctagcgtcctcgaggagctcggccctgagcctgaggttccctccgcacccaatccacctgcagcacaaccagacgatgaagaagacgaagaagaacttctgttgctgcagcccgaattacagggcggactgcgcacgaaggcgctgatcgttgatgagtcttgccggcgatag

SEQ ID NO: 30459 - DNA, 552 bp, synthetic construct
  source 1..552: mol_type = other DNA; note = Synthetic coding sequence
atggggccactgcctagaaccgtagaattattttacgacgtgctatctccctattcctggctcggattcgagatcctctgcaggtatcagaatatctggaatatcaacctgcaactcaggccaagccttatcaccgggatcatgaaagactctggctcattatctgcgatgaggttcctcacggccgtaaacctggaacacccagagatgctggagaaggcgagccgtgagctgtggatgcgggtctggtcaagaaacgaggacataacagagcctcagagcatcctggccgctgctgagaaagctggcatgagtgcggaacaagcccagggcttgctcgaaaaaattgccacacccaaggtgaagaaccagttaaaggagacaacggaagcagcctgtcgatatggagccttcgggcttcctatcactgtggcacacgtggatggtcagacccacatgctctttgggagcgacagaatggaactgctagctcaccttttgggggagaaatggatggggccaatacccccagccgtgaacgccaggctatag

SEQ ID NO: 30460 - DNA, 306 bp, synthetic construct
  source 1..306: mol_type = other DNA; note = Synthetic coding sequence
gagggtaccagcggcaagaccgctctccaccttgctgtagaaacccaggaaagaggtcttgtacagttcttgctgcaagccggagcccaggtggacgctaggatgctcaatggctgtacgcctctccatttggctgcgggtagggggctgatgggaatctcctctaccctgtgcaaagcaggggcagatagcctacttagaaatgtcgaggacgagaccccccaggatctgacagaagaatcgctggttttgctaccatttgacgatctgaaaatctccggaaaactgcttctgtgtacagattag

SEQ ID NO: 30461 - DNA, 14586 bp, synthetic construct
  source 1..14586: mol_type = other DNA; note = Synthetic coding sequence
atggctacgatgatccctcctgttaagctcaaatggctggaacacttgaattccagctggatcacggaagactccgagagcatcgctacaagggagggggtcgctgtcctgtatagtaagctggttagcaacaaggaggtggtgcctttaccccagcaggttttatgcctgaaggggccacagctccctgacttcgaacgagaaagtctctctagtgacgagcaggatcactaccttgacgcactgttgtcaagtcaactggcactggctaagatggtctgctcggacagtcccttcgcaggtgctctccgcaagcgtcttctagtgcttcagcgcgttttctacgctttgtctaataaataccacgataaaggaaaagtgaagcaacagcaacactcccctgagtcatcaagcgggtctgctgacgtgcatagtgtgtccgagagacctcggagcagcaccgatgccctaattgaaatgggcgtgaggaccggcctgtctcttctgtttgcgctcttgcgtcagtcctggatgatgcccgtgtctggtccaggtttgtccctgtgcaatgacgtcattcacaccgctatcgaggtcgtgagtagcctgcccccactgtccctggctaacgagtccaagatcccaccgatggggctcgattgcttgagccaagtcacaacctttctgaagggtgtgacaatccctaattccggagctgatacactggggaggcggctggcaagcgagctcctcctggggctggccgctcaaagaggctccctgagatatttgcttgaatggatcgagatggctctgggggcaagcgccgtcgtgcataccatggagaagggcaaactcctgtcgtctcaggaaggcatgatatcctttgactgcttcatgaccattcttatgcagatgagacgctccttgggctctagcgcagacagaagtcagtggagagaaccaaccagaactagtgacggcctgtgtagtctgtacgaggcagccctgtgtctatttgaggaggtgtgtaggatggcctccgactattctagaacatgtgccagtcctgacagcatacaaactggcgatgcccctattgttagcgagacgtgtgaagtgtatgtttggggctcaaattcgtctcatcagctggtggagggaactcaagagaaaatcctgcagccaaaactcgcaccatctttctcagatgcgcagaccatagaggccggtcagtactgcaccttcgtgattagtaccgacggctccgtgcgcgcttgtggaaagggaagttatggacggcttggtctcggcgacagcaataaccaaagcaccctcaagaagcttacttttgaaccccaccgtagtataaaaaaagtgtcttcctctaagggtagcgacggccacaccttagccttcaccacagaaggtgaggttttctcatggggagatggggattatggcaaactgggacatggaaattcctccactcagaagtaccccaagctcatccaaggcccactgcaagggaaagtcgtggtctgtgtgtctgcgggatacagacatagcgcggcagtgaccgaggatggcgagctttacacctggggcgagggagactttggccgtctagggcacggcgactcaaacagtaggaacatccctaccctcgtgaaggacatcagcaacgtcggggaggtcagctgcggctcctctcatactattgccctgagtaaagacggaagaaccgtctggtcttttggaggcggtgacaatggcaagctgggccacggcgataccaaccgcgtgtacaaacctaaggtgattgaggccctacagggcatgtttattcggaaggtctgtgctgggtcccagtcatcccttgccctgactagcaccgggcaggtgtatgcctggggctgcggcgcttgcctgggatgtggctcttctgaagccacagccctccgaccaaaactaatcgaggagctagcagctacaaggattgtagatgttagtatcggtgacagccactgcctggccctctcccatgacaacgaggtctacgcttgggggaacaactccatgggacagtgtggccagggtaactccacgggtcctattaccaagccaaaaaaggtgagcggccttgacggaatcgctatacagcagatctctgccggtaccagccattcactcgcatggacagctctacccagagaccgacaggttgtggcttggcatcgaccttactgtgtggatcttgaagagagtacattctcgcacctccgttcttttttggagcgatattgcgataaaatcaatagtgagattccgccattgcccttccccagctcacgagagcaccactcctttctgaagctgtgcctcaagctgctgtctaatcacctggctctcgccctagccggaggtgtggctacctctatcttggggagacaggccggaccactacgcaatctgttgtttcgcctaatggactctactgttccagacgaaatccaagaggtggttattgagacattaagcgtcggtgcaactatgctgctgccccctctgcgggagaggatggagctgctccacagcctcttgccacagggaccggatcggtgggagtcactgtccaagggacagaggatgcagctcgacataatccttaccagtctacaggatcacacacacgtcgcgtcactactgggctattcctcacccagcgatgccgctgacctttcttcggtgtgcacaggctacggcaatttatccgatcaaccatatgggacccagagttgccatcctgatacccacctcgcggaaatcttaatgaagaccctcctgaggaacctgggtttttacactgatcaggctttcggagagcttgagaaaaacagcgataaatttttgctgggaacatcctcttccgagaatagccagccggcacacctccacgaactcctgtgttcattgcagaagcagttactggctttctgtcacattaacaacatcagtgagaactccagttctgttgccctccttcacaagcacttacagctgcttctcccccacgccactgatatatacagtagatcagcaaatttgctgaaggaaagtccatggaacgggagtgtgggcgaaaaacttagggatgtcatctacgtaagcgcagctggttctatgttatgtcagatcgtaaactccctactgctactgccagtttccgtggcacgacccttgcttagttacttgctcgatctccttcccccactggattgcttgaaccggctgctaccagcagctgacctgctcgaagaccaagaactccagtggcctttgcatggaggtccggagcttatcgaccctgccggtctgccgctgccccagcccgcacagagttgggtgtggctggtggacctcgaacgaacaatcgctctcctcattggaaggtgcctgggagggatgctccagggctcacctgtgtcgccagaggagcaagacacggcctattggatgaagacccccttgtttagcgacggtgtcgaaatggatacccctcagctagacaagtgcatgtcttgtctgctggaggtggccctcagcggtaatgaggagcagaagccttttgattacaaactcagaccggagatcgccgtgtatgtggatctggcactgggatgttccaaagagcctgctcggagcctgtggattagcatgcaggactatgcagtttccaaggactgggattcagcaacgctatctaacgaatcactactggacacagtgagcagattcgtactcgccgcactacttaagcatacaaatctgctgtcccaagcatgcggtgagtcacgttaccagccaggcaagcatctgagcgaggtctataggtgcgtgtataaagtgagatcacgactactggcatgcaaaaatcttgagctgatccagacccggagctccagtcgcgacagatggatatctgaaaatcaagactccgccgatgtggacccgcaggagcactcatttactcgtacaatcgatgaagaagccgagatggaggagcaagcggagagggacagggaagaaggacatccagaacccgaagacgaagaagaagagagagaacacgaagtcatgaccgctggaaagatctttcagtgctttctgagtgctagagaggtagcgagatccagagatcgggatagaatgaacagtggcgctggcagcggcgcaagggcagatgatccaccgcctcagtcgcagcaagagcggcgagtgtcaacagaccttcccgaagggcaagatgtgtacaccgcagcgtgtaactcagtgatccaccgctgtgcattgttaatcctgggagtttctcctgtgatagatgaactccagaagaggagggaggagggccaactgcagcagccttctacatcagcttcagaaggtggcggtttaatgacccgcagcgagtccctgaccgcggagagccgactggttcacacttcccccaattatcggctgatcaagtctcgaagtgagtctgacctcagccaacccgaaagtgacgaagaagggtacgcgctgtccggcagacgtaatgtagatcttgacctggcagccagtcaccgtaaacgtgggccaatgcattctcagctagagtccctgagtgattcttgggcccgactgaagcacagccgcgactggctttgtaatagtagctatagctttgaatcagactttgaccttactaagtctcttggagtccacaccttgatagagaacgttgtgtctttcgtgagtggcgacgtagggaacgcacccggtttcaaggagccagaggagagcatgagtacttccccacaggcttctatcatcgccatggaacagcagcagcttagagccgaacttcggttggaggcactgcatcagatcttagtcctcctctctggcatggaggagaagggcagcatcagcctagcagggtctcgactgagctcagggtttcagtcaagcacactgctcaccagcgttaggttgcaatttctggccggttgctttgggctgggaaccgtcggccacaccggcggtaagggggagagcggacggctgcaccattaccaggacggaattcgggctgcaaaacgcaatatccagatcgagatacaggtggcggttcataaaatataccagcagctatctgcaaccctcgagagagccctacaggccaacaaacatcacattgaagctcaacagagacttttgttggtgaccgtcttcgccctctcagtacactaccagccagtagatgtgtcgctcgccatttcaactggcctcctcaacgtgctgtcacagttgtgtggtaccgatacaatgttagggcagccgctgcagctgttacccaagacaggagtgtcgcagctttctacagccctgaaggtggcctccaccaggctactgcagattctcgctatcaccacaggcacgtacgccgacaaactctcaccgaaggttgtgcaaagtttgctggacctactgtgctctcagcttaagaaccttctaagtcagacaggcgtccttcacatggcctccttcggtgagggcgagcaggaggacggcgaagaagaggaaaaaaaggtggattcctcaggcgagactgagaaaaaagatttccgagctgcgctccgcaaacagcatgccgctgaactgcacttgggtgacttcctggtgtttctccgccgtgtggtgtctagcaaggcaattcagtcaaagatggcttcccccaaatggacagaagtactgctgaatattgcctcccagaaatgctccagtggcattcccttggtcggcaatctgagaacccgacttcttgctctacatgtgctggaggccgtgttaccagcttgcgagtcaggcgtggaagatgaccagatggcccaaatcgtggaaaggcttttctccttactgtccgactgtatgtgggaaacaccaatagcccaggcgaagcacgcaatacagataaaggagaaggagcaggagatcaaactgcagaaacagggcgagctggaggaggaagacgaaaacctgcctatccaggaagtttcctttgacccggaaaaggcccaatgctgcctcgtggagaacggacagatcctgacccacggcagtgggggaaaaggatatggactggcctctactggcgtaacatcgggatgctatcagtggaagttctacattgtgaaagaaaatcgtggaaacgagggcacctgcgtgggggtgagcaggtggcccgtgcatgatttcaaccatcgtacaaccagtgatatgtggttgtatcgcgcatactccggtaatctctatcataacggagaacaaactttaaccttatcttctttcacacagggagactttatcacctgcgtcctcgatatggaagcaagaactatctcattcggcaagaacggtgaggagcccaaactcgccttcgaggacgtcgatgctgctgaactttacccttgtgtgatgttctacagtagcaacccaggcgagaaggtcaaaatctgcgacatgcagatgcgcggaaccccccgtgaccttctcccgggagatccaatttgcagcccggtggccgcagtgcttgccgaagcgactattcagctgatccggatcctccacagaacggaccggtggacttactgcatcaacaaaaagatgatggaaaggctgcataaaatcaaaatctgcataaaggagtctgggcaaaagctgaagaagtcaaggagcgtgcaaagtcgtgaagaaaacgagatgcgagaagagaaggagtctaaggaggaggagaaaggcaaacacacccggcatggactggccgatttgtccgagctgcagttaaggacactatgcatcgaagtatggcccgttctcgcagttatcggaggcgttgacgccggtctcagagtgggtggcaggtgtgtacacaagcaaacaggccgtcatgccactctgctaggagtagttaaggagggcagcacatccgcgaaagtacagtgggatgaggccgagatcacgattagttttcctaccttctggtcaccgagcgatacccctctgtacaatctggagccctgtgaaccactgccatttgatgtggcacgcttcaggggtctaaccgcttctgtgcttctggatctgacctaccttactggcgttcatgaggatatggggaaacagtcgaccaaaagacacgaaaagaaacaccgtcacgagagcgaggagaaaggcgacgtcgaacagaagcccgaatccgagagcgctttagacatgcggactggacttactagcgacgacgtcaagtctcaatctactacctcctcaaagtccgagaatgaaatagcctcctttagcttggatccaactttgccgagcgttgagtcccagcatcagatcacagaagggaagcgcaaaaatcacgaacatatgtctaagaatcacgatgtggcacagagtgaaattagggccgtgcagttgtcctatctctacctgggagcaatgaagtctctgtccgccttgctggggtgttctaaatatgcggaactcctgctgattcctaaagtgctagcagagaatgggcataactctgactgtgcttcatcccccgtggttcatgaagatgtggagatgcgggctgctctgcagtttttgatgagacacatggttaaacgcgctgtgatgcggagcccaataaagcgcgcattaggcctggccgatttggagagagctcaggcaatgatctataagctcgtcgtgcacggactactcgaggatcaatttgggggaaaaatcaaacaagagatcgatcagcaagcagaggaaagcgatcccgcacaacaagcacagacccctgtgacaacctcgcctagtgctagcagcaccacatcatttatgagtagttccctggaggacaccactactgctacaacacctgttaccgatactgagaccgttcccgctagtgaatcccccggagtgatgcctctgagtctcttaagacagatgttcagcagctatcccactactaccgtgttaccaacccgccgtgctcaaacaccgccaatcagctcactcccgaccagcccatctgacgaagtaggcaggcggcagtccctgacatcacctgatagtcagtctgcaaggccagcaaaccgcacggccctaagcgatccctctagcagactgtccacgagccctcctcctccagccattgcagtgcccttactcgaaatggggttttcattgcggcagatcgccaaagctatggaagccacaggagctaggggagaggccgacgcccagaacattacagtcctggccatgtggatgattgagcacccaggccacgaggacgaggaagagccccagtctgggagtaccgctgattcccggccaggcgcagcagtgttgggatcagggggaaagagcaatgacccgtgctatctgcagtcccctggcgacatcccatcggctgatgctgctgaaatggaggaggggttttctgaaagccccgacaacctggaccatacagagaacgctgccagcgggagcggcccaagcgccaggggcaggtccgcagtgacacggagacataagtttgatctggcagcacgtactctccttgcaagggccgctggcctgtatagatctgtgcaggctcatcggaaccagtctaggcgcgagggtatcagcctgcagcaggatccaggggcactgtacgactttaacttggatgaggagttagaaattgacctggatgatgaggctatggaagccatgttcggccaagatttaacatctgataacgacatcctcgggatgtggattccagaggttctcgactggccaacatggcatgtgtgcgagtcagaggaccgcgaagaggtggttgtctgtgagctgtgcgagtgttcggtggtgagttttaaccagcatatgaagagaaatcatccaggctgtggaaggtcggcaaataggcagggatatcggtctaatggctcttatgtggatggatggtttggcggtgagtgcgggtctggcaacccctattatttactgtgcggtacatgcagggagaagtacctggcgatgaagacgaagtccaagagtacttcctcagaacgatataaaggccaggcgcctgatttgattggcaagcaggatagtgtgtatgaagaggattgggacatgctagatgttgacgaagatgagaaactgacaggagaggaggaatttgagctgttggctggacccctggggttaaacgaccggaggatcgtccctgagcccgtgcagttcccggacagtgacccgttgggggctagcgtcgccatggttactgccacaaactctatggaagaaacactgatgcagattggctgccacggctctgtggagaaaagtagttcagggcgaattacccttggtgagcaggctgctgcactggcaaatccgcacgacagagtagtggcactgcggagggtaacagcagctgctcaagtgctcctcgctcggaccatggttatgcgggcactgagccttctttcagtctccgggtctagctgctcgctcgcagccggtctggagtctctcggcttaacagacataagaaccctggtgcgcttgatgtgtcttgcagctgctggtagggccggattgagtacgtctccatcagcaatggccagtacatctgagagatcccggggaggtcatagcaaagctaacaagccaatcagctgcctcgcatatttgtccactgcagtgggatgtctggcctcaaatgcgccatccgctgcgaagcttttagtgcagctgtgcacgcaaaatctaatatctgccgctacaggcgtgaatctgaccacagtcgatgattctatacagaggaagttcctgccatcttttttgaggggcatcgcagaggagaataagttagtaacaagcccaaacttcgtggttacccaggccctggtagccttgctggcggacaagggtgctaaactccgaccaaattacgacaagtctgaggtcgagaaaaaggggcctctggaactggctaatgcgctggcagcttgttgcctgtcgtctagattaagttcccagcacaggcagtgggctgctcagcagctcgtaagaacactggccgcacatgatagagataatcagactaccctgcagaccctcgcagacatgggcggtgacctgcggaaatgctcttttattaagctcgaggcacaccagaacagggtgatgacctgcgtatggtgcaataagaaagggcttctggctacaagcggtaacgacggtacaatcagagtgtggaacgttaccaagaaacagtactccctgcagcaaacctgcgtctttaaccggctggaaggagatgccgaagagagccttggatcgcctagtgacccatccttcagtccggtgtcctggtctatcagcgggaaatatttggctggagccctggaaaaaatggtaaatatctggcaggtaaacgggggtaagggactggtggatattcagccacattgggtttcagcactggcgtggccagaggaaggtcccgcaactgcgtggagtggcgagtcccctgaattactgctcgtgggccgaatggacggttctctgggccttattgaagtggtggatgtgtccacgatgcaccgcagggagttagaacactgctatcggaaggacgttagcgtgacctgcatcgcttggttctctgaagatcgaccttttgctgtcggttacttcgatggtaagctcttactgggcacaaaagagccactggagaaagggggaatcgtgctcattgatgcgcataaagacaccctgatctcaatgaaatgggacccgacaggccacattctgatgacctgcgcaaaggaagacagtgtcaaactttgggggtccatctccggctgctggtgttgtctacactcgctgtgccatcccagcattgtcaatgggatagcctggtgccgcctgcccggaaagggctctaaactgcagttgctgatggcaaccgggtgtcagtccgggctggtatgtgtttggcgaatccctcaggataccactcagacaaacgtcacctccgccgagggctggtgggagcaggagtccaattgtcaggacggatacagaaagtcaagcggggcaaaatgtgtgtatcagctgcgcggtcatatcacaccagtcagaaccgtagctttcagtagcgacggcttggctctggtttctgggggattaggaggtttgatgaatatatggtctttgcgcgatgggtccgtcctgcagacagttgtgatcggcagcggcgcaattcaaacaacagtttggatacctgaagtgggtgtggcagcgtgctctaaccgatcaaaagatgtgctggtggtgaattgcaccgcagagtgggccgctgctaaccacgttctggccacctgccgaacagccctgaagcagcaaggggtcctggggctcaacatggccccttgtatgagagcttttttggagcgactcccgatgatgttgcaggaacagtacgcatacgagaaaccccatgtggtatgcggtgatcaattagtgcacagtccctatatgcagtgccttgcctctctcgccgtagggctgcacctggaccagttgttatgcaacccccctgtgccccctcaccaccaaaactgcctgcccgatcccgctagttggaaccctaatgaatgggcttggttggagtgtttctcaactactattaaagcggctgaagcgctcactaacggggcacagttcccagagtctttcactgttcctgaccttgagcccgtgcccgaagacgaactggtatttctcatggacaattccaagtggattaacggaatggacgagcagattatgagctgggccactagccggcctgaagattggcacctggggggtaagtgcgacgtgtacttgtggggtgccggaagacacggccagctcgccgaagctgggagaaatgttatggtgcccgctgcagccccaagtttttctcaggcacagcaggtgatctgtgggcagaattgcacctttgtgatccaggctaacggaacagttttagcctgcggggaaggctcttacggccgactgggacaaggcaactctgacgacctccacgtgttgaccgttatatccgccctccaagggtttgtagttacgcagctggtgacatcctgtgggtcagacggacacagcatggcgctgacggaaagcggcgaagtgttctcctggggagatggagattacggcaagctaggccatggcaacagcgatcggcagaggcgcccacgccagattgaggccctgcagggagaagaggtagtgcagatgtcttgtggtttcaaacatagcgccgtggtcaccagtgacgggaaattgtttacttttggcaacggtgattacggcagactgggcctgggaaacactagcaacaagaagctgccggagcgcgtcactgctctagaaggctaccagatagggcaggtcgcctgcggcctgaatcatacactggccgtgtctgcagacgggtcaatggtgtgggccttcggagatggcgactacggaaaacttggcctggggaactcaactgccaagagttcccctcaaaagatcgacgtcctgtgcggaataggcattaaaaaagtcgcttgtggaactcaattctccgtggccctgaccaaagatggacatgtgtatacctttgggcaggaccgcctcatcggtctgccggaaggtcgggctcgtaaccacaacagaccccagcaaattcctgtgctggctggggttattattgaggatgtggctgttggagctgaacacacacttgccctcgcgtctaacggagacgtgtacgcctggggcagcaatagcgagggtcagctcggtttaggtcacacaaatcatgtccgagagcccactctcgttacgggcctgcaaggcaagaatgtgaggcagatttccgctggcaggtgccacagtgcggcttggaccgcccctcccgttccacccagagccccaggagttagcgtaccgctgcagttagggttaccagatactgtgcctcctcaatacggtgccctgagggaggtgtcaatccatacagtgcgggctcgcttaagactgctctaccatttcagcgacctcatgtactcgagttggcgtctgctgaacctgtccccaaacaatcagaatagtacgtctcattacaatgctgggacctggggtatcgtccagggccagctccgcccattacttgccccacgtgtttataccctgcctatggtgcgttccatcggaaagactatggtgcagggaaagaactatgggcctcaaatcaccgtaaaaaggatatccactcggggtcgcaagtgtaagcctattttcgtgcagattgctaggcaggttgtgaaattaaatgcttcggacctcagactgccttctagggcttggaaggttaagcttgtcggcgagggggctgacgatgccggaggagtgtttgacgacacaattactgaaatgtgtcaggaactggagaccggtatagtggatttgctgatccctagtcccaatgccaccgctgaggtcggttacaatcgcgaccgctttctattcaatccaagtgcatgtctcgatgaacacctcatgcaattcaaatttctcgggatcttaatgggcgtggccatccgcacaaagaagccattagatctgcaccttgcaccactcgtgtggaagcagctatgttgtgtgccactcaccctcgaagatctggaagaggtggacctgctctacgttcagacactgaactctattttacacatcgaagattctgggattactgaggagtcctttcacgagatgattccgttggatagttttgtggggcaatctgcggacggcaaaatggtgccgataatacccggtgggaactccatccctctaacttttagcaataggaaggagtatgtagagcgggcaattgaataccgcctgcatgagatggatcgacaggtagccgcagtgcgggaagggatgagttggatcgtgcctgtgccattgctgtcactgctgacagctaagcagctggagcaaatggtctgcggaatgccggagattagtgtggaggtactgaagaaagtggtgagatatagagaggtcgacgaacagcaccagctggtgcaatggttctggcacacgctggaggaattttctaacgaggaaagggtgctgttcatgaggttcgtgagcggcagatcccgcctccccgcaaataccgccgatatctcgcagcgattccagatcatgaaggtggaccggccatatgactcccttccaacaagccaaacttgctttttccagctgagactacctccatactctagccagcttgtgatggcagaaagactccgatatgcgatcaataattgcaggagcatcgacatggacaactacatgttgtcgagaaacgttgataatgccgagggctccgacaccgactactat

SEQ ID NO: 30462 - DNA, 3633 bp, synthetic construct
  source 1..3633: mol_type = other DNA; note = Synthetic coding sequence
atggcctcgcagctacaggtgttttcgccgccatcagtgtcctctagcgcattctgtagcgccaagaagctgaaaatcgaaccatcaggatgggacgtctctggccagtctagtaacgataaatattacacgcattctaagactctgccggctacacagggacaggcaaactcatctcatcaagtggctaattttaacatcccggcttacgaccagggtttattgctcccagcacctgcagtggaacacattgtcgttactgctgcggactcatccgggagcgctgcaacatcaacatttcagtctagccagacactcacccacaggtccaacgtctctctgttagagccctatcaaaaatgcggcctgaagaggaagagcgaggaagtggactctaatggaagtgtgcagatcatagaagaacatccccctttgatgctgcaaaataggaccgtagtgggcgctgccgctacaaccacaaccgtgaccaccaagagttcatcaagttctggggaaggagattatcagttggtccagcatgaaatcctatgctcaatgaccaactcatatgaggtcttggaattcttagggagaggtaccttcggccaagtcgcaaaatgctggaaaagaagtacgaaagaaatcgttgccattaaaattctgaaaaatcacccttcctacgccagacaggggcagatcgaagtttcaatcctgtcgaggctgtccagcgaaaacgcggacgagtataactttgttcgatcctacgagtgtttccagcacaagaaccacacctgtctagtcttcgaaatgcttgaacagaacctgtacgacttcctcaaacaaaacaaattttcaccgctgcccctaaagtacatccggccaattttgcagcaagtggccacggccctcatgaagttgaaatccttaggccttattcacgctgacttaaagccggaaaacatcatgttggtggaccccgtgcggcaaccctatcgcgtgaaggtcattgacttcggctctgcaagccatgtgtcaaaagcggtctgctctacctacctgcaatctaggtactaccgcgcacctgagatcattctagggctgcccttctgcgaggcaatagatatgtggagcctgggctgtgtgatcgcggaattatttctgggctggcccctctatcctggggctagtgagtatgaccaaattcgctatatttcccagacgcaggggctgcctgcggaatacctgttgagtgccggtacaaagaccacccgcttctttaaccgggatcccaacctcggatatccattgtggcggctcaagactcctgaggaacacgagctggagactggcatcaaatcaaaggaagcgcgtaagtacatctttaactgcttggatgacatggcccaggtgaatatgagtacagatttggagggtacggatatgcttgcagaaaaagcagatcgacgggagtacatcgatttgctaaagaaaatgctgacaatagatgccgacaagcgcattacgccactgaagaccctcaatcatcagttcgtcaccatgactcatctgctagacttcccccattctaatcacgttaagtcttgtttccagaacatggagatctgcaaaaggagagtccacatgtacgacaccgtatctcaaatcaagtcccctttcacaactcatgttgctcccaatacgagcactaacctgaccatgagtttctcaaaccagctgaacacagtccataaccaggcctccgtgcttgcctcgagttcaaccgcagctgctgcgactcttagcttagccaactccgatgtgtctttacttaactaccagtccgccctgtatccaagttccgccgctcctgtacctggcgtcgcccaacagggcgtgagcctccagcccggtactacacagatttgtacccaaacggacccttttcagcagaccttcattgtctgtccgccagctttccagacgggcctgcaagccactacaaagcacagcggttttcctgtcagaatggataatgccgtcccaattgtcccacaggcccctgctgcccagcccctgcaaatccagtctggagtactgacacaaggctcttgtacaccccttatggttgctaccctgcacccccaggttgccaccatcactccacagtacgcagtccccttcactctctcatgtgccgctggaaggcccgctctggtggaacaaacagccgctgtgctgcaagcatggcccggagggacgcaacagatcctactgcccagtacttggcagcagctgccaggagttgctctgcacaattcagttcaacctactgcaatgatcccagaggcaatggggtctgggcagcagctagccgactggaggaacgcccatagccacgggaatcagtactccacaatcatgcagcagcccagccttttgaccaatcacgtcactctagccaccgcgcagccactcaacgttggggtggcacacgtggtgcggcaacagcagtctagctccttgcccagcaagaaaaacaaacagtctgcacctgtttcctcaaaaagtagcctggacgtcctgcctagccaggtgtattccctcgtcggcagctctccattgcggacaacaagcagttataactctctggttccagtgcaagaccaacaccagcccattatcattcctgataccccctccccccctgtatctgtgattactattaggtcagacactgacgaggaggaagacaataagtacaaaccgagctccagcggtctcaaaccacggtccaacgtaatttcttatgttacggtaaatgacagccctgattcagattctagcctgagctcaccatatagtaccgacacactgtctgctctgcgaggtaactccggaagtgtacttgagggtcctggtcgggtcgtggccgacggcaccggtacacgaactatcattgttcctcccctaaaaacgcagctgggcgattgcacggtcgctacacaagccagtggactgttgagtaacaaaacaaaacccgtagctagtgtttccggccagagttctggctgttgcattacaccaactgggtacagggcccagcggggtggcaccagcgctgcgcagccattaaatctgtcccagaatcagcagagctccgctgcacccacttcacaggaaagatcttccaatccggcacctaggcgacagcaagcctttgtcgcacccttgtctcaggctccttatactttccaacacgggagtccattacattccaccgggcacccacatcttgcgcctgctccagcccacttgccgtcccaagctcatttgtacacttacgctgcccctacctccgcagccgctttgggaagcacaagcagtatcgcccatctcttttctccacagggcagcagtcgccacgccgcagcatacactacacatccatctactttggtgcatcaagtgccagtttcagtcgggccatcactactgacatccgcatctgtggccccagcccagtatcagcaccagtttgctacacagtcctatatcggcagcagccgaggatccacaatatacacaggatatcctctgagtccaactaagatcagccaatactcctatctttag

SEQ ID NO: 30463 - DNA, 579 bp, synthetic construct
  source 1..579: mol_type = other DNA; note = Synthetic coding sequence
atggggaaaggctgcaaagtcgtagtttgtggactgcttagcgtgggcaagaccgcgatcctggaacaactcctttacggcaaccacaccataggcatggaggactgcgagaccatggaggacgtatatatggcaagtgtcgagaccgacaggggggtaaaagaacagctgcacttatatgacacgagaggtcttcaggagggcgtggaactcccaaaacactacttttcttttgccgacgggttcgtactggtatattcagttaataatctggagtcgtttcaaagggtggaacttcttaagaaggaaattgataaattcaaagataaaaaagaggtagccatagtggttttgggaaacaaaatcgacctctctgagcagcggcaagtggatgccgaggtggcccagcagtgggctaaatcagagaaggtgcggctgtgggaagtcacagtcactgataggaagacactcattgaaccttttacactgctggcttctaaactgtcccagccacagtcaaagtcttccttcccactgcctggcagaaagaacaaaggcaattctaactcggagaactag

SEQ ID NO: 30464 - DNA, 1803 bp, synthetic construct
  source 1..1803: mol_type = other DNA; note = Synthetic coding sequence
atggcctctaaccacaagtccagtgccgctagaccagtcagccgcggtggagtcggccttacaggcaggcctccgtctggcataaggcccctgtccggcaatataagagtagcaaccgccatgcctcctgggactgccagaccaggctctagaggatgcccgatagggaccggcggagtgttatcatctcagataaaggtcgcccataggccagtcacccaacaaggcctaaccgggatgaagacggggacgaagggcccacagcggcagatcttagacaagagttattatttaggcctgctgaggagcaaaattagcgaacttactaccgaagtgaataagctacagaagggcatcgagatgtacaaccaggagaatagcgtctacttaagctacgagaaaagagccgaaactcttgccgttgagatcaaagaactgcagggacagcttgctgattataatatgctcgttgacaaactcaacaccaacaccgaaatggaagaggtgatgaacgattataacatgttgaaggcccagaatgatcgggagacccaaagcctcgacgtcatcttcaccgaacgtcaagcaaaagaaaagcagatcagatctgtggaggaggagattgagcaggagaagcaggccaccgatgatattatcaagaacatgtctttcgaaaaccaggtcaaatatttggagatgaaaactaccaatgagaaactgcttcaggagctcgacaccttgcagcaacaactggattcgcaaaatatgaagaaggagtcgctggaggctgagatcgcccatagccaggttaagcaagaggccgtccttcttcacgaaaagctgtatgaactagagagccaccgagaccaaatgattgcggaagataagtccattggtagccccatggaagagcgcgagaagctgttaaagcagattaaggatgataaccaagaaatcgcttctatggaacggcagctgaccgatacaaaggagaaaatcaatcagttcatcgaagaaataagacagctggatatggacttagaggaacatcagggcgaaatgaaccagaagtataaggagctgaagaaaagagaagaacatatggacacattcatcgagacatttgaggagaccaagaaccaagagctgaagcgcaaagcccaaatagaggccaatatcgttgccttgctcgagcattgctctaggaatatcaaccgtattgagcagatcagtagcattaccaatcaggagcttaagatgatgcaagatgacctgaatttcaagagcaccgaggtgcagaagagtcagagtactgcgcagaacttgacaagcgatattcagcggctgcagctggatttgcagaaaatggagcttttagaaagcaaaatgacggaagagcagcacagcctcaagagcaaaattaaacagatgaccactgacctggagatctataacgaccttccggctcttaagagttcaggcgaggagaagataaagaagcttcatcaggaacggatgatccttagtacccatcgcaatgctttcaagaagatcatggagaaacagaatatcgaatatgaggcactgaagacccagctgcaggagaacgagactcacagccagctgacgaacctcgaacgaaagtggcagcacctagagcagaacaactttgcgatgaaggagttcatcgccacaaagtcacaggagtcagactatcagccaattaagaagaacgtgaccaaacaaatcgcggagtacaataaaacaatcgtagatgcgcttcacagtacctctggcaattag

SEQ ID NO: 30465 - DNA, 1197 bp, synthetic construct
  source 1..1197: mol_type = other DNA; note = Synthetic coding sequence
atgctgcgcaggaaaccaagcaatgctagcgagaaagagttcaacctcgacgacaatattcccgaagacgactccggagtccccactcccgaagatgccggtaaatcgggcaagaagttgggcaaaaagtggcgcgcagtaatctcgagaacaatgaatcgtaagatggggaaaatgatggttaaggccctgtccgaggaaatggctgacaccttggaagagggaagcgcctctccgacctctccagattattcacttgactcacctggaccagagaagatggctcttgcctttagcgagcaggaggagcatgagctccctgtcttgtcgagacaggccagcacgggctccgagctctgttctccatcccctgggagcggaagttttggagaggagcccccagctcctcagtatactggaccattctgtggcagggcccgtgtgcacacggatttcactccaagcccctatgatcatgattccctcaagcttcaggtcagaagcgcaagcggtctcctttggtcacttgcgggatgcgcacagaaggggagctggactgaaccaggctacgacagcgtgagtggagggcagggcccaccatatcctctctccctcgcccctttcagcagtcccctgcctcagcagaagggcgatgtgattcagattatcgaaaagccgccagtggggacctggctcggactgctgaacgggaaggtaggtagttttaaattcatatatgtcgatgtgctaccagaagaggcagtggggcacgcccgaccaagccggagacaatccaaaggcaaacggcctaaacccaagaccctgcacgaactgctggaacgtataggcctggaagaacacactagcaccctgttgctgaatggctaccagacgttagaggactttaaagaactcagggaaacacacttaaacgagctaaatatcatggacccgcagcatagggccaaactgctcaccgccgctgaacttctcttagattatgataccggatccgaggaagcggaagagggcgcagaatccagtcaggagccggtggctcacactgtctccgagcccaaggtagatatcccacgggactcggggtgctttgaagggagcgagtcaggtcgcgatgacgccgaacttgctggaaccgaggaacagctacaaggactgtctctggcgggagctccttag

SEQ ID NO: 30466 - DNA, 1002 bp, synthetic construct
  source 1..1002: mol_type = other DNA; note = Synthetic coding sequence
atgggaacgcggaaaaaggtgcatgcatttgtgcgggttaagccgacagacgactttgctcatgaaatgataagatacggagatgacaaacgcagtattgatatccacctcaaaaaggatatcaggaggggcgttgtcaacaaccagcagaccgattggtcatttaaactggatggtgtgctgcatgacgcctctcaggacttggtgtatgagaccgtggcgaaggatgtagtgagtcaggcactggatggatataacgggacaatcatgtgttacggacagacgggtgcaggaaagacttataccatgatgggggcaactgaaaattacaagcacaggggtattctgcctcgcgcactgcagcaagtgttccggatgatcgaagagagacccacgcacgctataacagtaagagtttcttatctggagatttacaatgagagcctgttcgacctgcttagcaccctcccctatgttggtcctagcgtgacaccgatgactattgtggagaatcctcagggcgtcttcattaagggactgagcgtgcacttgacttcacaagaagaggacgccttctcgttgctctttgagggcgaaacaaatcgaatcattgcgagtcatactatgaataaaaacagctccaggtcacattgcatctttaccatttacctggaggctcactcacggacgctgtccgaagagaaatacatcacctcaaaaattaacctcgtggatctcgccggttctgagcgcctcgggaaaagtggctcagaaggtcaggtgctcaaggaagctacatatattaataagtctctgtcctttttggagcaggcaatcatcgcgctcggggatcagaaacgcgatcacataccttttcgccagtgtaaattgacccacgccctgaaggatagcctcggagggaactgcaatatggtgctagtcactaacatttacggcgaagcggctcagcttgaggaaactggctctcgtctctggttgtag

SEQ ID NO: 30467 - DNA, 1248 bp, synthetic construct
  source 1..1248: mol_type = other DNA; note = Synthetic coding sequence
atgatgctcggtcctgaaggcggtgagggcttcgtcgtaaagttaagaggcttaccctggagttgctccgtggaagatgtccaaaacttcctgagcgactgtaccatacatgatggcgctgcaggcgtgcatttcatttatacgagagagggaaggcagtccggggaggcattcgttgaactggggagcgaagacgatgtcaagatggccttgaaaaaagaccgggaatctatgggccataggtatatcgaagtgttcaaatctcaccggactgaaatggattgggttctgaaacattccggcccaaacagtgccgactctgccaatgacgggtttgtgagactccgcggtttaccgttcgggtgtactaaagaggagatagtgcagtttttctctgggctggaaattgtgcccaacggtattaccctgcctgtggatccagagggaaagatcaccggggaagccttcgttcagttcgcctcacaagaactggccgaaaaagccctcggaaaacataaggaaaggatcgggcacaggtatattgaggtatttaagtcctctcaggaagaagttcgctcttactcggatccccctctgaagttcatgagtgtgcaacggccaggcccttacgaccgtcccggtacagctcgccgatatatcggcattgtcaagcaggcagggcttgaacgcatgaggcctggcgcatatagcacagggtacggtggatacgaggagtacagcggactttccgatggatacgggtttactacagatctgttcggccgtgatctatcttattgcctcagtggaatgtacgaccaccgctatggcgacagtgaattcacagtgcagagcaccactggccactgtgtgcatatgaggggcctgccatacaaggctacagagaatgacatttacaattttttttctccccttaatcccgtgagagtgcatatcgaaatcggtcccgatggacgggtgaccggagaagccgatgtggaattcgctactcatgaggaggcggtggccgcaatgtcaaaagaccgcgcaaatatgcaacaccgatacatcgagctgttcttgaactcaactacgggcgcttctaacggagcgtattcaagccaggttatgcagggcatgggtgtaagcgcagcccaggccacatacagtggtctagaaagtcagtctgtttccggttgctacggggctgggtatagtggccaaaactccatgggcggatacgactag

SEQ ID NO: 30468 - DNA, 3108 bp, synthetic construct
  source 1..3108: mol_type = other DNA; note = Synthetic coding sequence
atgtctgagcaagagcggattcaggagtgtttaagaaaagaaataagatccctcttgatcagcaccaaggacggtctgtcgccccaagagttggagaaagaatacctgctgatggtgggcaatcacctcccactgaggattttgggataccggtccactatggaattggtgctcgacatgccagacgttgtccgagtgtgccctggagctggtggaactgtgattctcaaggctatccctgacgagtccaccaaaggaattgctagtcttgtggccaagcagcgaagtagtcacaagctacggaactccatgcacaagggtaggcctagtatttactcagggccacgttctcatcgcagggtgccatatagggggagggtggcccctatcctgccagccgtagtaaagtcagaattgaaagatctgctcgctctgagccccgtccttttgtccgacttcgagaaggcatttgccaaaaggttcgggcgttcattccagtatatgcagtacgggtttttatcaatgtttgaggtcctcaatgccgcatccgacgtaatctccgtggagcagacaagggccggatcccttctgatgttaaagaagtcagttacggaagaaaaacctaggggctgccccgcaggaaagatattcacccagcctttcaggatgaagcagggatcctattcaaccgggttcccagttgctaagccttgttttagtcagcccacttccaatatggaacccccaaaacagattatgtccatggagaaaacatccaaattaaatgtagtggagactagcagactaaaccacacggaaaagttaaaccaattggagaatacttttaaatctgttatcgcacagataggtcctggtgggacgattagctccgagctgaaacacaagatcaaatttgtggttagtaagtttcccgaggggctgttcattagcaaactactgggcgagtacgaggtcatctttaaagagcagctgagtcccaagaaactgggtttcttaaacgtgaccgagctcgtgggagcgctcagcgatattcttcacgtggagtttcggaaaggccaccaggatcttctcgttttcgacgccgataaaaagcccttgcctccggtccagagtgataaaaagatagaagctaaagcttgtgtgagcagcccgcctcgaaatagtctgagtaccgccgctgtgaaggagaccgtatggaattgcccttcaaaaaagcagaaagaaccacagcagaagatctgcaagaagcccaatctcgtcgttaagccccttcagcttcaggtggagacaaacaaaagcgaactgaaccttgccatggccaaccatgatatcccaccggatgcagtgcccaataaaaaactgtgccggctccccccactcgacacaagttcacttattggagtgtttgtggagtatattatcagcccgtcccaattttacatccgcatttattcccgagattcctcggaactactggaggacatgatgattgaaatgagaagatgctatagtaatcagctcgtaagcgaccggtacgtcatgccagaatgctttatacaacccggtcatctgtgttgcgtgcgcatctccgaggacaagtggtggtacagagtgattatccacagagttctggaaaagcaggaggtcgaggtattctatcccgacttcggcaatataggaatcgtgcagaagagcagtctgaggtttcttaaatgctgctacaccaagcttcccgcacaggccattccgtgttcccttgcatgggtgaggccagttgaagagcactggacaagcaaagcaattctgcaatttcagaaactgtgcggtctcaaacctctagtgggagtcgtcgacgagtacgttgatggaattctgaatatttttctttgcgacactagctctaatgaagacgtctactttcaccatgtcctcaggactgagggacacgccatcgtgtgtagggagaacatcagctccaaaggttttagcgagctaaaccccctggccctatacactactagctcgggaggaccagaggacatcgtgctgactgagttgggataccccagtcagcaacattatttcaatgaagatcgtaaaatttcccctcaatcaaaagagagcgagttgcgtattcttcaggatatcaacgacgaaaagagccttagtcatttgaagtctgaatccaaagagccgctgaaggacagtgaattcgaatcactgaaaacatgtaacaagtcatttgaagaggatccaaagtggagcaaccctgagccaaacgatctgaaggaggaaaacgaggatgagatccccaccggtatgccatgcctggaatcagtcacaataggagacgacatttgggatgaaaactggctgccactgcaggcgaagatgggtaagggcggagacgcagcttcacacctttttactgcctccctaggaggcaagaaccagtactccagctgcaaagagatgccacagaaagattggtgtttctctactccaaaggacacttgggatgatagctggcagccatctggtctcgtcaatggcaccaaggtggaagtacacaaaccggaagttctgggcgcacaggagaaaaatactgggaccaatagaacacagaaacagctcgacataaacggtagctcagactcatccactctccctaaactggaggaattctgtaccagtctcacacagtccgagcagtctgccgatggatcgcaatctgagcctaacaattcccagacccagcccaaacagatacagctcagtactgccgcaccttgcagtacgacagctgttgatgacagcgcagaaaagccttccgggtctgtagaatcatctccagagatcttgaagaatgaggatttcagttcatcaagagccattactttgtataaagataaacggcaagagagtgtggaccaactaagcctaatcctgtcatatgagtgtcagattagtcaaaagctgtatattcctcggagtactgctacagctgcgttgggtgctgccgctcggctggccacttcgcgtagtctactccactggtacccttcggttaaacggatggaagcatag

SEQ ID NO: 30469 - DNA, 660 bp, synthetic construct
  source 1..660: mol_type = other DNA; note = Synthetic coding sequence
atgggtggcgcacaactggagctgccctctggcgctcggccaggggtgtgcgtacggagaagtttcagggcacatgccggtgaccagcctcgcaggcctcccggtccaatccctgtgcctggcacaatgaaacaagagagcgctgcgcctaacactccacctacatctcagagtccgactcccagcgctcaattcccacgcaatgatggagacccgcaagccctctggatctttggttatggttccttagtgtggcgtcccgacttcgcatattctgattcaagggtagggttcgtcagaggctattcgaggcgcttttggcagggcgacactttccatcggggatccgataaaatgcctgggagagtcgttacacttctcgaggaccacgaaggatgcacctggggagtcgcatatcaggttcagggggaacagaaccctggctatcttggcccagcgccagaagaagcgattgctacccagatccttgcttgcagaggtttcagtggccataacctggaatatctgttgcgactggcagattttatgcagctgtgtggcccacaggcccaggatgagcacctggctgctatcgtggacgccgtcggaaccatgctgccatgtttctgtcctaccgaacaggctttagcgcttgtttag

SEQ ID NO: 30470 - DNA, 2382 bp, synthetic construct
  source 1..2382: mol_type = other DNA; note = Synthetic coding sequence
atgtcagaacagggcgatctgaatcaagccatcgctgaggaaggtgggaccgagcaggaaacagcaacacctgagaatggtattgtaaaatccgagtcactggatgaggaagagaagctagaactccagcgccgactggaagcccagaaccaggaaagacggaagtccaagagcggagcaggcaaaggcaagctgacccgatccctggctgtatgcgaggaaagctctgcccgtccaggcggtgaatcattacaggaccaggaaagcattcatctccagctgagctcttttagcagcctgcaggaagaagacaaaagtcgtaaggatgacagcgagcgggagaaggagaaagataaaaacaaagataaaacctccgagaagccaaaaatccgaatgctttcaaaagattgcagccaggagtacactgacagcaccggcattgatttgcatgaattcctcatcaataccttgaagaataacagcagagaccggatgattctactcaaaatggagcaagagattattgatttcatagctgacaacaacaaccattacaagaaattcccacagatgtcatcttatcagagaatgctggtgcatagagtagcggcatactttggcctggatcacaacgtggaccagaccggtaagtcagtgattatcaataagaccagttccacacgcatccctgagcagcgcttttgcgagcacttgaaggacgagaaaggggaggaatcgcagaaacgatttatcctaaaacgggataatagttccatcgacaaggaggataaccagtccgtatgctctcaggaaagtctgtttgttgagaatcgcggaaatcgcgacgggagtggcaggactagcgggtctcggcagagttcatcagagaacgagctgaagtggagcgaccatcagcgagcctggtctagtaccgatagtgacagctccaaccggaacctgaaaccagccatgacaaagactgcctccttcgggggaataaccgttctgacccgcggtgactccactagcagtaccaggagtactggaaaactttccaaggcgggaagcgagtcgtccagctctgcagggtccagtggctcgctttctaggactcatccccctttgcagtccacgccactggtgagcggagttgccgcaggctcacctggctgcgtaccttacccagagaatggcataggaggacaggtggcgcctagctctactagttacattctactgccattggaagccgcaacaggtatacccccaggtagtatactgcttaacccacacacaggccaacctttcgttaaccctgatggcacccccgcaatttacaatcctcctacctcccagcaacccctcaggagtgctatggtcggacagagtcagcagcagccccctcagcagcagccctctccacagccccagcagcaggtccagcctcctcaaccccagatggccggtccccttgtcacacaatccgtccaaggactccaagcgtcctcccagtctgtgcagtatcccgctgtgtcatttcctcctcagcatttgctgccagtttcccctacccagcattttccaatgagggacgacgtggctactcagttcggccagatgacccttagtaggcaaagtagtggagagacaccagaacctccaagcggacctgtctacccttcgtctctcatgccgcagcccgctcagcagccctcctatgtcatcgcctccactggccaacagctcccaactgggggtttctcaggatccggccctccgatcagccagcaagtcttacagcctccaccgagcccccaaggctttgtacagcagcctcccccagcccagatgccagtttattactatccctccggtcagtatccaaccagcacaacgcagcaatatcggcctatggccccagttcaatataatgcgcagcgctcccagcagatgcctcaagccgcacagcaagccggataccagcctgtgttatctggccagcaaggcttccagggtctgattggggtacaacaaccaccccagagccaaaacgtcataaacaatcagcagggaacacccgtgcaatctgtaatggtcagttatccaacaatgagtagttatcaggttccaatgacccagggttctcagggactgcctcagcagtcctatcagcagcctataatgttgccaaaccaagcaggccaagggagtttgccagccaccggtatgcctgtgtactgcaacgtgaccccgccaacgcctcagaacaacctgagactaattggtccacactgcccatcatccacagtacctgtgatgtccgctagttgtcggacaaattgtgcttccatgtcgaacgcaggttggcaagtgaagttctag

SEQ ID NO: 30471 - DNA, 1842 bp, synthetic construct
  source 1..1842: mol_type = other DNA; note = Synthetic coding sequence
atggccacaatccctgactggaagctgcagctcctggccagacgaaggcaggaggaggcaagcgtgcgcggaagagaaaaggccgagagggaacggctgtcacagatgccggcttggaaacgagggctcctggaacgcagacgagcgaagctaggcttgtcccccggtgagccaagccctgtgctggggacagtggaggctgggcctcccgaccctgacgaaagcgcggtgctgttagaagctattggccctgtgcaccagaacaggttcattcgccaggaaagacagcagcagcagcagcagcaacagaggtcagaagagcttttggccgagagaaaacccggaccgctggaagcacgcgagcgcaggcccagtcctggcgagatgcgcgatcaatctcccaaaggcagagagtcacgcgaggagaggctgtctcccagagagactagggaaagacgccttggaattggcggagcccaagagcttagcctacggccactggaggctcgggattggcgccagagccccggagaggtcggggatcgcagcagccggttatccgaggcttggaaatggaggctcagtcctggagaaacaccagaacgcagcctgcgtctcgccgagtctcgggagcagagcccaagacgcaaggaagtagagagcaggctttccccaggagaatccgcataccagaagttaggccttacagaggctcacaaatggcgacccgactccagagagtcccaggaacagagccttgtgcagctggaggctacggagtggcgtttgcggtctggagaggagcggcaggattactcggaagaatgcggacggaaggaagaatggccagtgcctggagtggcacctaaagagacggccgaactcagcgaaacccttacgagagaggcccaggggaattctagcgccggagtcgaagcagcagagcaacggcctgtagaagacggcgagcggggaatgaaaccaacggaagggtggaaatggaccttgaatagtggcaaagctcgtgaatggactcctcgggacatcgaggctcaaacacagaagcccgaaccccctgagagtgccgaaaagctgctagagagcccaggagtggaagccggtgagggtgaggcagaaaaggaggaagcaggtgcacagggcagaccgcttagggctctacagaattgttgttccgtgcctagtcctctacccccagaggacgcgggtaccggtggcctgagacaacaggaggaggaggccgtcgagcttcagcccccaccaccagcccctctgtcacctccacccccagccccaaccgccccacagcctccgggagatcctctcatgtccagactcttttacggggtgaaagcaggcccaggagtgggcgctcctcgtagaagcggtcatacatttaccgtgaacccgagaagatctgtgccaccagcaacacctgccacacccacatctccagccaccgtggatgccgctgtgcccggagccggaaaaaaaagataccctacagcagaggaaatcctggtgctaggcggttacctcagactgagcaggagttgtctggcaaagggctccccggagcggcatcacaaacaactgaagatttcttttagcgagacagcgctcgagaccacttaccagtatccatccgagtccagcgtgctggaagagctgggcccagaacccgaagttccaagcgcccctaatccaccggctgctcaacccgacgatgaagaagatgaggaggagctactgctcttgcagccagagctgcagggcggtctaagaacgaaggcacttatagtggatgaatcttgccgtcgatag

SEQ ID NO: 30472 - DNA, 582 bp, synthetic construct
  source 1..582: mol_type = other DNA; note = Synthetic coding sequence
atggccagagcgggtcccaggctggtcctgtctgaggaagctgtcagagccaagtccggcctgggaccccaccgcgacctcgccgagctccaatcattgagcattccgggtacataccaagaaaaaataacgcatctcggtcattcactgatgtccctgaccggcctgaagtctttggacctttcaaggaattccctggtgtctcttgaaggaatccagtacctgaccgccctagagagtctcaatctgtattacaactgtatcagcagcctggcagaagtattccgattgcacgccttgaccgagctggtggacgtggatttccggctcaaccccgtggttaaagtcgagcctgactaccgcctcttcgttgtgcatcttctgccgaagctccaacagcttgacgacagaccagtccgcgcaagcgagcgcaaggccagtcgcctacacttcgcttccgaggattccctagattcaaaggaatccgtgcccgcttccctcaaggagggacggattcagacatctgttgagcctgcagtcggcacagttcccgtgtgggggctttgggaggcaggaccctag

SEQ ID NO: 30473 - DNA, 177 bp, synthetic construct
  source 1..177: mol_type = other DNA; note = Synthetic coding sequence
atgtactttaactataaatctgtgtgcggcagctgcgggtttggatcgtgttacggatgcggttatggttgtattcactcaacacattgtgggtgtaatggttactacggatgttatgagaacaaatatagcgtcatagatgacctgatcttctttgcaagcaagaaatgccattag

SEQ ID NO: 30474 - DNA, 585 bp, synthetic construct
  source 1..585: mol_type = other DNA; note = Synthetic coding sequence
atgaatgggcgagccgacttccgggagcccaacgcggaagtgcctcgcccaatcccccatataggaccagactacattccgacagaggaagaacggagggtattcgctgagtgtaatgatgagtctttttggttccggagcgtgccgctagctgcaacctccatgctgatcactcaaggcttgatctctaaagggatcctgtcaagtcatcctaaatatggttccattccgaaactgatattggcatgcattatggggtactttgcaggaaagttgtcatacgtgaagacatgccaggaaaaattcaagaaactggagaactcaccgcttggtgaggcactgaggagtggacaggccagacggtcctccccacccggacactactaccagaagagtaagtatgattcaagcgtgtcaggccagtccagctttgtaaccagcccagcagctgataacatcgaaatgctgcctcattacgagccaatcccatttagctcaagcatgaacgagagcgcacccaccgggatcacagatcacatcgttcaggtcaaggtgaataagtatggagatacctgggacgagtag

SEQ ID NO: 30475 - DNA, 2421 bp, synthetic construct
  source 1..2421: mol_type = other DNA; note = Synthetic coding sequence
atgagcagcagccctgtgaacgtgaagaagttgaaagtttccgagctcaaggaggagctaaagaagcggaggctgtctgataaaggtctgaaggccgagctgatggaacggctccaggccgctctcgatgacgaggaagcgggtgggcgtcccgcaatggagcccggaaacggatcacttgaccttgggggagactccgcaggaagatccggggcaggcctcgaacaagaggccgctgctggcggagacgaagaagaggaggaggaagaagaggaggaggagggcataagcgctttggatggggaccagatggagctcggggaggagaacggggctgccggagccgctgacagcggtcccatggaggaagaagaggccgcttctgaggacgaaaatggggatgaccaaggtttccaggaaggagaagacgagttgggcgatgaggaggagggggctggagacgagaatggacacggcgaacagcagccgcagcctcccgctactcagcagcagcaaccacagcaacagaggggagccgctaaagaagcagcaggaaaatctagtggtcctacatctttatttgctgtcacggtagcacctccgggagctaggcaggggcagcagcaggccggtggtgatggtaaaacagaacagaagggaggagataagaaaagaggagtgaaacggcctcgggaggatcatggaagagggtatttcgagtatattgaagaaaacaagtacagcagagctaaatctccccagcctccagttgaggaggaggacgagcacttcgatgatactgtcgtctgtcttgacacctataattgcgatctccatttcaaaatttctagagacagactgtcggcgagttccctcacaatggaaagctttgctttcttatgggccggtggccgagctagttatggcgttagtaaagggaaggtgtgctttgagatgaaggtcaccgagaaaattcccgttaggcacctgtatacaaaggatatagacattcatgaagttcggataggttggagcttgaccacaagcgggatgcttctcggtgaggaggagttcagttacggatattcgcttaaaggcatcaagacgtgtaactgcgagacagaagactacggcgaaaaatttgatgagaacgatgttatcacatgttttgctaactttgaatcagatgaagtagaactctcgtacgccaagaacggccaagaccttggtgtcgcctttaagatctctaaagaagtgcttgctggaaggcctctgtttccccatgtcctgtgtcataactgcgccgtcgaattcaattttggacagaaagaaaaaccatactttcctataccggaggaatacacctttattcagaacgtccccctcgaagatagggtgagaggcccaaaaggtccagaagaaaagaaggattgtgaagtagtgatgatgatcgggctgcctggcgcaggaaagacaacctgggtgacaaagcacgccgcagaaaatcccggaaagtacaacattctcggaaccaatactataatggacaaaatgatggtcgctggatttaaaaagcaaatggcagacaccggcaagctgaatacactgctgcagcgggcaccccaatgtctgggcaagttcatcgagatcgctgccaggaaaaagcgaaatttcatactggaccaaactaatgtgagtgccgctgcacaacgaagaaaaatgtgtctgttcgccggatttcagcgcaaggcagtcgtggtgtgcccaaaggacgaagactacaagcagcggacccagaagaaggccgaagtggaggggaaagacttgccggagcatgcagtactcaagatgaagggcaattttacactcccagaagtcgcggaatgcttcgacgagattacctacgtggagctccagaaggaggaagctcagaaattgctggagcagtacaaagaggagtccaaaaaggcactaccgccagaaaaaaaacagaacacaggatccaagaaatccaataaaaacaagagtggcaagaaccagtttaacagagggggtggccatcggggtcgaggcggattcaacatgaggggcggaaattttaggggcggagcgccaggaaacagggggggttacaatcgcagaggtaacatgcctcagagaggcggtggtggcggagggtccggaggcataggatatccataccctcgggcacctgtcttccctgggcgaggctcctattctaacagaggtaattacaatagaggcggaatgcctaatcgaggcaattacaatcaaaactttcgcggacggggaaacaacaggggctacaagaatcaatctcaggggtataaccagtggcaacagggccaattttgggggcaaaaaccctggtcccagcattaccatcagggatattattag

SEQ ID NO: 30476 - DNA, 651 bp, synthetic construct
  source 1..651: mol_type = other DNA; note = Synthetic coding sequence
atgagcaccgtggatctggcaagagtgggcgcatgcatcttgaagcacgcagtcactggagaagccgtggagcttcgaagcttgtggcgagaacatgcgtgtgtcgttgccggattgcgaaggtttggatgcgtagtatgtcgctggatcgcccaggacctgtcgagtttggcaggcctcctggaccagcacggagtgcgccttgtcggggtcggacctgaggcgttgggactccaggagtttctggacggtgactactttgccggagaattatatctggatgagtctaaacaactgtacaaagaacttggatttaaaaggttgtggacccaagccagccctgagttcggacaggctacatggtgccttcggaggtataattctctgagcattctccccgcagccctcggaaagccggtgagagatgtcgctgccaaagcaaaggccgttggcatccaagggaacctgagcggagacttactccagtcaggaggtttgctggtagtatcgaagggcggagataaggtgctgttacacttcgtgcaaaaatctccaggcgattatgtccccaaggaacacatcctccaggtgctaggaatttcggctgaggtgtgcgctagcgatcccccacagtgtgatagagaggtatag

SEQ ID NO: 30477 - DNA, 1191 bp, synthetic construct
  source 1..1191: mol_type = other DNA; note = Synthetic coding sequence
atgttctggaaatttgatttgcacacctcttcgcaccttgacacgctgctggagcgggaggacctgtcgttacctgaacttttagacgaggaggacgtcctccaagaatgtaaggtggtgaatcgcaagctgttggatttcctccttcagcctccacacctgcaggccatggttgcctgggtgacacaagagcctcctgattccggcgaagaaaggctccgctataaatacccttccgtcgcgtgcgaaatactaacatccgatgttcctcagatcaatgatgctctgggagcggacgagagcttgctgaatcggctttatggatttctgcagagcaccggttctctcaacccactgcttgcatctttcttttccaaggtaatggggattctgataaatagaaaaacggaccaactggtgtcctttttaaggaagaaagacgattttgtcgacctcctgcttcagcacataggcactagcgccattatggatctgctgcttaggctgttaacgtgcgttgaacgccctcaattaaggcaggatgtcgttaattggctgaacgaggaaaagatcgtccaacggctcattgagcaaatccaccctagcaaggacgaaaatcaacattcaaacgcctcacagtctctatgtgatattattagactgagccgtgagcagatgatacaggtgcaagactcgccagtgccaactgatgcccctacaagccctcgagtgtccggggaagaggaactgcatacaggaccccctgctccacaggggccattgtctgtgccgcagggcctaccgactcagagtctggcaagtccccctgcccgagatgctctacagctgcggagccaagatccgactccccctagtgcacctcaggaggctacggaaggcagtaaggtaactgagcccagcgcaccttgccaggcattggtgagtatcggagacttacaggctactttccacggaattagatctgctcctagcagcagcgacagcgcgacccgggacccctcaacgtctgtgcccgcttctggagcacaccaacctccacagacaacggagggagaaaaaagccccgagcctcttggacttccccagtctcagtcagcccaggcgctgacccctccccctatcccgaatggttcggctcctgagggtcccgctagccctggtagtcaatag

SEQ ID NO: 30478 - DNA, 2178 bp, synthetic construct
  source 1..2178: mol_type = other DNA; note = Synthetic coding sequence
atgggcactcgtaagaaggttcatgcatttgtccgcgtgaagcccaccgatgattttgcccacgagatgattcgctacggtgacgataagcggtccatcgacatccatttgaaaaaggatatcaggaggggtgtagtcaataatcagcagaccgattggtcattcaaactcgacggagtcctgcacgatgctagtcaggacctggtttatgaaaccgtggcaaaggacgttgtcagtcaggcactcgacggatacaatggcacaatcatgtgctatggtcagaccggcgctggtaagacatataccatgatgggagctacagagaactacaaacatcgcggaatattaccgagagccctccagcaggtttttcgcatgatcgaggaacggcctacccacgctataactgtccgagttagctacctggagatttacaatgagtctttgtttgatctcctgtccacgctgccatacgtgggcccatctgtgactccaatgaccattgtggagaaccctcagggagtgtttataaaaggattgtctgttcacttgaccagtcaggaagaagatgctttttctctcctttttgaaggcgaaactaatcgcattatcgctagccataccatgaacaaaaactcctccaggtcccattgcatatttaccatctacctcgaagctcactcaaggaccctgtcagaggagaaatacatcacttcaaagattaacctagtagatctggctggtagcgaaagactcggaaagtccggttctgaggggcaggtcctgaaagaggccacctacatcaataagtcactcagctttctcgaacaggcgatcatagccctgggtgaccagaagcgggatcatattcctttcaggcaatgtaagctcacccacgccctgaaagattcactggggggaaactgcaacatggtcctggtcacaaatatctatggggaagccgctcaattggaagagaccctctcctcactgaggtttgcatcccggatgaaactggtcactacggaacccgctattaacgagaaatacgacgctgagcgcatggtgaaaaacctggagaaagaactggccctacttaagcaagagttagccattcatgattctcttaccaatcgcaccttcgtgacttatgatccaatggatgaaatccagatcgcagagataaacagccaggttcggcgttacctcgaaggaacattggatgagatcgacattatcagcctaaggcagattaaggaggtttttaaccagttcagagtggtcctgtctcaacaagaacaggaagtggagagtaccttaaggcggaaatacacactgatcgacaggaatgacttcgccgctattagtgctattcagaaggccggtcttgtagacgttgatggccacctcgttggcgaacccgagggacagaactttggccttggggtcgcgccattttcaactaaacccggaaaaaaggccaagtctaagaaaacattcaaagaaccgctgcgacctgatacgcctccctccaaacctgtggcgttcgaggaatttaagaatgaacagggttccgaaatcaaccggattttcaaagaaaacaaaagtatacttaacgaaaggaggaaaagggcaagtgaaactacacaacacattaatgccatcaaacgagaaattgacgtcactaaggaggctttaaacttccaaaagagcctgagggagaagcagggtaagtatgagaacaagggcctcatgataattgatgaggaagaatttctgctcattctcaagctgaaagacttgaaaaaacagtaccgttccgagtatcaggatctccgcgacctacgagctgaaatacagtactgccaacacttagtggatcagtgtaggcaccgattactgatggagttcgacatctggtataatgaaagctttgtgatcccggaagacatgcagatggcgcttaagccaggcggatccattcgaccaggtatggtgcctgtgaacaggattgtgagcctcggtgaggatgaccaggacaagttctcacagctgcagcagagggttttgcccgaaggccctgattctataagtttctataatgccaaagtcaaaattgaacaaaaacataattacttaaaaaccatgatgggacttcagcaagcacaccgcaagtag

SEQ ID NO: 30479 - DNA, 282 bp, synthetic construct
  source 1..282: mol_type = other DNA; note = Synthetic coding sequence
atggcagcagctactggcgatcccggactcagcaagctccagtttgcccctttctcatcagctctggacgtcggattttggcacgaactcacccagaagaagctgaacgagtatcggctggatgaggcccctaaggacatcaagggctattactacaatggtgattcagcaggactgccagcgcgtctcactctcgaattttccgccttcgacatgtctgcaccgacaccggctcgttgttgccccgctattggtaccctgtataatacaaatacactgtag

SEQ ID NO: 30480 - DNA, 333 bp, synthetic construct
  source 1..333: mol_type = other DNA; note = Synthetic coding sequence
atgggcaagaaacagaacaaaaagaaggtcgaggaagtgctggaagaggaggaagaagagtacgtcgtggagaaggtcctcgacaggcgcgtagtgaaaggcaaggtcgaatacctgttgaaatggaagggcttttcagacgaagataatacatgggagccggaggagaacttagattgccccgaccttattgctgaattcttacagagtcagaaaaccgctcacgagaccgacaagtctgaggggggaaaaaggaaagccgattccgactctgaggataagggcgaagagagtaagcccaaaaagaagaaggaggaaagtgagaagccatag

SEQ ID NO: 30481 - DNA, 270 bp, synthetic construct
  source 1..270: mol_type = other DNA; note = Synthetic coding sequence
atgagttattaccagaggcccttttcaccttcggcctactcactccccgctagtctgaactctagcattgtgatgcagcatggtactagcttagactccaccgacacttatccccagcacgctcagagtttagatggtacaacttcctctagcattccgctgtataggtccagcgaagaagaaaaacgggtgactgttatcaaggctccccactacccagggattggacccgtggatgagagcggcattcccacggcaatacgcacttag

SEQ ID NO: 30482 - DNA, 1269 bp, synthetic construct
  source 1..1269: mol_type = other DNA; note = Synthetic coding sequence
atggagcggaaggacttcgagacctggcttgacaacatatccgtgacgttcctcagtctcactgacctacagaagaatgagacactcgaccatttgatcagcctctctggcgctgttcagctcagacacctttccaataatttagaaactctgctgaagcgagattttctcaagctgcttcctttagagctgtccttttatctgctgaagtggctggatccacagaccctgctgacctgctgcttggtcagcaagcagtggaacaaggtgatctctgcgtgcacagaagtatggcaaactgcctgcaaaaacctcgggtggcagattgacgattctgtgcaggatgccttgcactggaagaaagtttatttgaaagccatccttcggatgaagcagttagaagatcacgaggcatttgagacctctagcttgatcgggcatagtgctcgggtgtacgccttatactataaagatggcttattgtgtacaggatctgatgatctctcagctaagttgtgggatgtcagcacagggcagtgcgtgtacggcatccagacacacacttgtgccgcagtcaagtttgacgagcagaaactggtaacgggcagtttcgacaatacagtggcatgttgggaatggtccagcggtgccagaactcaacacttccgaggccacactggggctgtttttagcgtcgactacaacgacgaactggatatcctggtgtctggcagcgctgatttcaccgtgaaggtctgggccctgtcagcaggaacatgtcttaacactctcaccggtcatactgaatgggtcacaaaggtggtcctgcaaaaatgtaaagtgaaatctttgttgcattcacctggggactacattctgctgtccgcagataaatacgagattaaaatctggcccatcggtcgggagatcaattgtaaatgtttaaagaccctgtcagttagcgaagatcgctcaatatgcctgcagccacgtttacacttcgatggcaagtatattgtctgttcttcagctctgggcctctaccaatgggacttcgctagctacgatattctccgagtgatcaagacacccgagatcgctaatctggccctgctcggatttggagacatttttgccttgctgtttgacaaccgctacctgtacatcatggatttacgcacagaatctctcatctcccgctggccacttccggagtacagaaagagcaagcgtggatcaagctttcttgcaggcgagcatccaggttag

SEQ ID NO: 30483 - DNA, 1179 bp, synthetic construct
  source 1..1179: mol_type = other DNA; note = Synthetic coding sequence
atgagcgctctggcgggtgaggatgtttggagatgtcccggatgcggggaccatatcgccccatcccagatctggtatcggaccgtgaacgagacgtggcatggcagctgctttcgcaggagcaactccattagtaaatctcctgggccatcctctccgaaggaacctctgctgtttagtagagacatctccaggagcgaatcccttagatgttcatcaagttattctcagcagatattccgaccttgcgaccttatacacggagaggtacttggcaagggcttcttcggccaggccataaaagtaacccacaaagcgacagggaaggtgatggtcatgaaggagctaatcaggtgtgacgaagagacgcaaaagacttttctgaccgaggtcaaggtgatgagatcactcgaccaccccaacgtgcttaagttcattggcgtgttatacaaagataagaagctgaacctactcaccgagtatatcgaaggcggtaccttaaaagactttctgcggtcgatggaccccttcccctggcaacagaaggtgagatttgccaaaggcattgcgtccgggatggcctacctgcatagcatgtgcatcattcacagggacctaaatagccacaattgccttatcaagctggataaaaccgtggtggtagcggactttggactcagcagacttattgtggaggagaggaagcgtgcacctatggaaaaggccactaccaaaaaacgaactctgaggaaaaatgatcggaaaaagcgctatacggtagtcgggaacccctactggatggcgcctgaaatgctcaacggtaaatcctatgacgaaaccgtcgatatcttcagctttggcatcgttctttgtgagatcataggccaggtctacgccgacccagactgtttgccacgcacactggattttggcctcaacgtcaagctgttctgggaaaaatttgtgcccacagactgccccccagctttcttccctctggctgcgatctgttgccgacttgaacccgagtccaggcctgctttcagcaaactcgaagattcgtttgaggcactgtctctgtatctgggcgagctgggcatccccttgcccgctgagttggaggagcttgatcacacagtttctatgcaatacggtcttaccagggattccccaccttag

SEQ ID NO: 30484 - DNA, 480 bp, synthetic construct
  source 1..480: mol_type = other DNA; note = Synthetic coding sequence
atggcgacatccgctccacttcgaagtttggaggaggaagtcacttgttctatctgcttggattacttaagggacccagtgacgatcgattgcggccacgtgttttgtcggtcgtgcacaaccgatgttcggccaatcagtggctcccgccctgtgtgtcccttgtgcaagaaacctttcaagaaggaaaatatccgaccagtttggcagctggaaaaaatactgaatcacttgtccaccctgcgacgggacagagataagatccaagggttccaggccaaaggcgaggccgacattctggcagcccttaagaagctgcaggaccaacggcagtacattgtagctgagtttgagcagggacatcaatttctccgggaaagggaggagcacctccttgaacaattagcaaagttggaacaggaactcactgaaggcagagaaaaatttaaatccaggggcgtcggtgagctcgcccgatag

SEQ ID NO: 30485 - DNA, 3585 bp, synthetic construct
  source 1..3585: mol_type = other DNA; note = Synthetic coding sequence
atgttttccctagatagtttccggaaggatcgggctcaacatagacagcggcaatgcaaactgcccccacctaggctgcccccaatgtgcgtcaacccaacccccggtggaaccataagccgggctagtagagatctcctgaaggagttccctcaaccaaagaacctgttgaattctgtgataggcagagcgttaggtatttctcatgcaaaggataagctcgtctatgtccataccaatggcccaaaaaagaagaaggtcacccttcacataaagtggcctaagtcggttgaggtcgaggggtatggaagtaaaaagatagacgctgaacggcaggccgcagcagcggcatgtcaactctttaagggctggggacttctgggtcccagaaacgagttgtttgacgccgcaaagtaccgcgtgcttgctgaccggttcggctctccggctgactcttggtggaggcccgagccaacaatgccacctacgtcatggagacagctaaaccctgagagcataagacctggaggccctggcggtctatccaggtcccttggacgggaagaggaggaagatgaagaggaagagttagaggagggaaccatcgatgtgacagactttctatccatgacccagcaggatagtcatgctcctctacgggactccaggggctcaagcttcgagatgacggacgacgactcagcaatccgggctctcactcagtttcccctgcccaaaaatttactagcgaaagtgatccagatcgccacctccagctctacagctaagaacctcatgcaattccatacggtcggcacaaaaacaaagctttctacgttgaccctcctttggccctgtcccatgacctttgtagctaaggggaggaggaaagctgaggctgagaacaaagccgctgccctcgcatgcaagaagctgaaaagcctggggttggtggatagaaataacgagcctctgacccacgcaatgtataacctcgcatccctccgggaactcggcgagacacaacggaggccctgtacaatccaagtgccagaacccatactgcggaagattgaaacattcctgaatcactaccccgttgagtcatcatggattgctccagaactgcgcctacagagcgatgatatcctcccactgggaaaggattctggaccgttgtcagatccaattacagggaagccatacgttccccttctcgaagctgaagaggtgagactgagccagtcgctcctagaactgtggagaagaagaggccctgtatggcaagaagcccctcagctccctgtggatcctcaccgcgatacgatactgaacgcaatcgagcaacaccccgtggtcgtcatctctggcgatacggggtgcgggaaaaccacccgcattccccaactacttctcgagagatacgtgacagaaggtcgcggagcacgttgtaacgtgataataactcagcccaggaggatttcagccgtcagcgtcgctcaaagggtgtctcacgaactggggccaagccttcgtagaaacgtagggtttcaggtaaggctggaaagcaagcctcctagcagagggggtgccctattgttttgcacagtaggaatattgttgagaaagctccagtcaaaccctagtttggaaggggtctctcacgtcatagtcgacgaagtacatgaacgggacgttaataccgactttctgctgattctattaaaaggcctgcaacgcctgaatcccgcactcagactcgtgctgatgagtgcaactggagacaacgagaggtttagtcgctactttggaggatgcccggttattaaggttccaggcttcatgtacccagtcaaagagcattacctggaggatattctggccaagttaggcaaacaccagtacctgcacagacaccggcaccacgaaagtgaggacgagtgcgccctggatttggaccttgtgacagatttggtcttgcatatcgatgccaggggggaaccaggaggaatattgtgctttctgccaggctggcaagaaatcaagggggttcagcaaagactgcaggaagctctcggaatgcacgagtcaaaatatttgatcttgcctgtacattccaacatccctatgatggatcagaaagccatttttcaacaaccaccagtcggggtccgcaagattgtgctagctaccaacattgccgaaacctcaattactatcaacgacattgtgcacgtggtcgattccggcctccacaaagaggagcggtacgatcttaagactaaagtctcttgtctcgagacggtgtgggtctctagggctaacgtgattcagcggagggggagagctggtagatgccagtccggtttcgcttaccatctgttccccaggtcaagactagaaaaaatggtcccatttcaggttccagagattctcaggaccccactcgagaacctggtgctccaggcgaaaatccacatgcctgagaagactgctgtcgaatttttaagcaaggcagttgactcccccaacattaaagccgtggatgaagccgtgatcttgcttcaggaaatcggcgtgttagaccaacgggagtatctgactactctgggccagaggttggctcatatctccaccgatccccgtctcgccaaggcaatcgttctggcagctattttccggtgcttgcatcctctgctggtggtcgtttcctgtcttactcgcgacccattttcttcttccttgcagaaccgcgctgaagtcgataaagtgaaggccctcctgagccatgattctgggtctgaccatttggcattcgtccgcgctgtggctggctgggaggaagtcctgcgatggcaggatcggagcagcagagagaactacttagaagagaacctgctgtacgcaccttctctgcggtttatccacggtctcattaaacaattctctgagaatatctacgaggctttcctcgtcgggaaacccagcgactgcaccctggcctctgcccagtgtaatgaatactctgaagaggaggagttggtgaaaggtgttctcatggccggactgtatccgaacctcatccaggtgcggcaaggtaaagtgacccgccaaggcaaattcaaaccaaattcagtgacatatcgcactaaatccggtaacattttgttgcacaagtccactataaatcgggaggctactcgcctgaggtcaagatggcttacctacttcatggctgttaaatccaacggttccgtgtttgtacgcgactccagtcaggtgcacccactggcggttctactgctgactgacggcgacgtgcacatccgcgacgatgggaggagagcaacaatctctctgtcagactccgacctgctgagactcgagggagattctcggaccgtccggttgctgaaagagctcagacgggctctgggccgtatggtcgaacgttctctcaggagcgaactggcagcactcccgccttccgtccaggaagagcacggtcagttgcttgctcttcttgcagagctcttacgtggtccctgcggtagcttcgacgtgcgcaaaacggccgatgactag

SEQ ID NO: 30486 - DNA, 207 bp, synthetic construct
  source 1..207: mol_type = other DNA; note = Synthetic coding sequence
atgtcttattaccaacgaccctttagcccctcagcttacagtctgccagcatcactgaattcctcaattgtgatgcagcatggcacttctctcgattccaccgatacgtacccgcagcatgctcaaagcctggacgggactaccagtagcagcataccgttgtatcgatctagcgaggaggagaaacgggttactgtgattaaatag

SEQ ID NO: 30487 - DNA, 1419 bp, synthetic construct
  source 1..1419: mol_type = other DNA; note = Synthetic coding sequence
atgtctcggcgagtggttaggcagtccaaatttagacatgtgttcggtcaggctgcgaaagccgatcaggcgtacgaagatattcgggtgtccaaagtgacatgggactccagcttttgtgccgtgaacccaaaattcctggccatcatcgtcgaggcgggagggggaggtgcgtttattgtccttccgctggccaagactggcagggtggacaaaaactatcccctggtcacgggccacacagctcctgtgctggatatcgattggtgcccacataatgacaacgtcatagcatccgcctctgatgatactactatcatggtgtggcaaatccccgattacacacctatgcgcaatatcacggaaccaattatcactctggaaggtcattctaaaagggtcggtattctgtcatggcacccaactgcaagaaacgtcctcttgtccgctggaggcgataatgtaatcattatctggaacgtaggcaccggagaagtgttactctctctggatgacatgcatccagatgtcatccactctgtttgttggaactccaacgggtccctgttggcaacaacatgcaaggacaaaaccctccgcattattgatcctcgcaagggccaggtggttgccgaacaggcccgacctcacgaaggagccaggcctctaagagctgtgttcacagctgacggaaagctgctttcgacaggcttctctcgaatgagtgagaggcagctggcgttgtgggaccccaacaactttgaggagcccgtagctctgcaagaaatggacacatctaatggcgttctccttcccttctatgacccagacagctccattgtctacctctgtggcaaaggagattcttcaattcgctattttgagattacagacgagccaccgtttgttcactacctgaatacattttcttcaaaagagcctcagaggggtatgggctttatgccgaagcggggtttagacgtttccaaatgcgaaattgcacgcttctacaaactccatgaacgaaagtgcgagcctattatcatgaccgtcccacgcaaatctgatctgttccaggacgacctgtaccccgacacccccggaccagagccagcacttgaggccgacgagtggttgtctggacaggacgctgagccagtcttaatttctcttagagacgggtacgtgcctcctaaacaccgcgaactgagagtaaccaagaggaatatcctggacgtgaggcctccctccggacccagacggtcccagagtgcaagcgatgcccctctgtcccagcagcataccctggagacgctactggaagagatcaaagctctgcgagaacgagtgcaggcgcaggaacagcgaataactgcgttagaaaatatgctttgtgaactcgtcgatgggactgattag

SEQ ID NO: 30488 - DNA, 390 bp, synthetic construct
  source 1..390: mol_type = other DNA; note = Synthetic coding sequence
atcctacacagcctcgtccagacgggaatttgtgtcattaccctcgctgagagccatcccgttctgcaatccggaaaaaccataaagagtatctcctaccaaatctccacaaactgcagtagactacagaataaggtctcagggaagtttaaaaggggtgcccagttcttaaccgagctagcacccctttgtaagatctactgtagtgacggtgaagagtatactgtctccagctgcgtcagagggcgtctaatggaggtgaatgagaacatcctgcataagcccagtattctccaggaaaaacccagcaccgaggggtatatagcggtggtgctgcctaagttcgaggagtctaagtcaataacagaggggttgctcactcagaagtag

SEQ ID NO: 30489 - DNA, 735 bp, synthetic construct
  source 1..735: mol_type = other DNA; note = Synthetic coding sequence
atggtgcatcaggacaactgctcataccaggcccagaagaatgagcgagaaagtattcggcagaagctggctcttggatccttcttcgatgatggccctggaatctacactagttgcagcaagtccgggaagccatccctgtccagtcgcctgcagagtggaatgaacctccagatctgctttgttaatgactccggctctgataaggattctgacgcagacgatagcaaaacagagacctcactggatactccactctccccgatgagtaaacagagctccagttatagcgatagagatacaaccgaagaggagtctgaaagcctggatgatatggattttctcactcggcagaaaaagcttcaggcggaggccaaaatggccctcgctatggcaaaacctatggctaaaatgcaggtagaggtcgaaaaacagaacagaaagaagagccccgtggccgatctgttgccgcatatgcctcacatctcggagtgcttaatgaagcgctcccttaagcctaccgatctgcgggacatgaccataggccagcttcaggtaattgtcaatgacctgcattcccagattgagagcttgaatgaagaattagtccaactgttgctaattcgcgatgagctccacaccgaacaggatgccatgctggtcgacatcgaggacctgacccgccatgcggaatcacagcagaagcatatggccgaaaagatgccagcgaagtag

SEQ ID NO: 30490 - DNA, 1620 bp, synthetic construct
  source 1..1620: mol_type = other DNA; note = Synthetic coding sequence
atggctaccagtgcgcctttgcgaagtcttgaggaggaggtcacatgctccatctgtctggattacctccgcgatcccgtaactatcgactgcgggcacgttttttgccgctcttgcacaaccgacgtgcgtccaatctcagggtcgaggccagtgtgccctctatgtaagaaaccattcaaaaaggaaaatatccgcccagtatggcaactggccagcttagtggaaaatatcgaacgtctgaaagttgataagggcagacagcccggagaggttaccagggagcaacaggatgcgaaactatgtgaacgccatagagaaaagctccactactattgtgaagatgatggaaagttgctgtgcgtgatgtgcagggagtcgcgggagcatagaccgcatacagctgttctaatggaaaaagctgcccaacctcatcgggagaaaatcctgaatcatctgagcactctgcgcagagatagggacaagatccaaggtttccaggcaaagggcgaagccgatatactagcagccctgaaaaagttgcaggatcaacgccagtatatcgttgctgagttcgaacagggtcatcaatttctcagagagcgcgaagagcatctgctggagcagttggccaagttagagcaggagctgaccgaaggcagagagaagttcaagtctcgcggagtcggcgagctagctcgtttggccctggttatatcagagcttgaaggtaaggctcagcagcctgcggcagagctgatgcaggataccagagactttctcaatagataccccaggaagaagttttgggtgggaaaaccgattgccagggttgttaagaaaaaaacaggagaattctctgataagttactgagtttgcagcggggtcttagagagtttcagggcaaattactaagggacctggaatacaaaacagttagcgttacattggatccgcagagtgcatcggggtacctacagctgagcgaagactggaaatgcgtaacttacacctctctgtataagtccgcttatctgcatcctcagcagtttgactgcgaacctggtgtactgggctccaagggcttcacatgggggaaagtctactgggaggtggaggtagaacgagagggatggtccgaggacgaagaggaaggagacgaggaggaagagggtgaggaggaagaggaggaggaagaagccggttacggggacggctatgacgactgggaaacagatgaggatgaagagtctttgggcgacgaggaggaagaggaggaggaggaagaagaagaggtgctggaatcctgcatggttggggttgcaagggactccgtgaagaggaagggagacctttctctgcggcctgaagacggggtgtgggcacttcgtttgtcttcatcaggcatttgggccaatacttcgcctgaagccgagctatttcccgcactgcggccaaggcgggtaggcatcgctttggactatgagggtgggaccgtgacattcaccaacgctgaatcccaggaactcatctacaccttcaccgcaacattcacacgacgtttagtccctttcctgtggttgaaatggcctggaacacggctgctgcttaggccctag

SEQ ID NO: 30491 - DNA, 441 bp, synthetic construct
  source 1..441: mol_type = other DNA; note = Synthetic coding sequence
atgtttgaaatactgacaagcgagttctcataccagcacagtctgtccattctggttgaggaattcttgcagtcaaaggagctccgtgccacggtcacacagatggagcaccaccatcttttcagtaacatcttagacgtcttgggcgcttcccagagattcttcgaagacctcgaacaacggcataaagcccaagtgctcgtcgaagacatttcggacatcctggaagaacacgctgagaaacacttccacccatatattgcttactgctcaaacgaggtctaccaacagaggactctgcagaaacttatcagtagtaatgctgcctttcgagaggctcttcgggagattgagagacggcctgcatgcggcggtttgcctatgctgagcttcctgatactgcccatgcaaagagtgactcgtcttccgctgctaatgtag

SEQ ID NO: 30492 - DNA, 483 bp, synthetic construct
  source 1..483: mol_type = other DNA; note = Synthetic coding sequence
atggaggcggaaaggcctcaggaggaggaagacggcgaacagggtccaccccaagacgaagaaggttggcctccaccaaacagcactacaaggccttggcgatccgccccaccttctccccctccccctgggacacggcacacagcactcggaccacgctcggcatccttgctcagcctgcaaacagaactcctcctggatctggtggccgaagctcagtccaggagactagaggagcagagagccacattctacaccccacaaaacccgtccagcctcgcccctgcgcctttgaggcctctggaggacagggaacagctttatagtacaatcctttcacaccagtgccagcgaatggaagctcaaagaagtgagcccccactgcctccaggtggacaagaacttctggaactcctgctgcgagtccaaggcggaggcagaatggaagagcagcgcagccgcccacccactcacacatgttag

SEQ ID NO: 30493 - DNA, 303 bp, synthetic construct
  source 1..303: mol_type = other DNA; note = Synthetic coding sequence
atgtcatactaccaaagacccttttccccttctgcctacagtctgccagcatccttgaattcttccattgtgatgcagcacggtaccagcctggattccaccgacacttatccccagcacgcccaaagtctggacggcactacaagttcctctattccactgtacagatcatccgaagaggagaaacgtgttactgtgattaaggcaccccactacccaggtatcgggcctgttgacgagtctggcatcccaacagcaatccgcaccacggtagaccggccaaaagactggtataagacatag

SEQ ID NO: 30494 - DNA, 369 bp, synthetic construct
  source 1..369: mol_type = other DNA; note = Synthetic coding sequence
atggctaccagcgccccactgagaagcctggaggaagaggtgacctgcagtatctgcttggactacctccgggatcctgtgaccattgattgcggccatgtattttgcagatcatgcaccaccgatgtgaggccgatctcaggctctagacctgtctgccctctttgtaagaagcctttcaaaaaggaaaatattagaccagtatggcagctggcttctctggtggagaatatcgagaggctgaaggtggacaagggacggcagccaggggaggtgactagggaacagcaagacgcgaagctttgcgagagacaccgtgagaaattgcattattattgcgaggacgatgggaaactcctttgtgtatag

SEQ ID NO: 30495 - DNA, 633 bp, synthetic construct
  source 1..633: mol_type = other DNA; note = Synthetic coding sequence
atggtgtccatgtccgtgccagattgcctctcaattatgacctatgtctcacagtactacaatcatttctgttctcccggacaagccggagtgtcccccccacgcaagggactcgcaccttgttcacctccgtcagtagcccctacacccgttgaacccgaagacgtggctcagggggaagaactgagctctgggagccttagtgaacagggaacgggccagaccccaagtagcacctgtgcagcatgccaacagcatgtgcacctggtacaacggtacctggccgatggcagactttatcacagacattgctttcggtgtcgcaggtgttcctcaaccctccttcctggtgcatacgagaacggcccagaggaaggcactttcgtctgcgccgagcattgcgctcgccttggcccaggaacacgcagcggtactaggcccggtcccttcagtcagccaaagcagcaacaccagcagcagttggctgaggatgctaaggatgtgccaggagggggaccctccagctcagcacctgccggtgcggaagcggacgggcctaaggccagcccggaggctcggccacagattccgactaagcccagagtcccaggaaaacttcaggaattggcgtag

SEQ ID NO: 30496 - DNA, 390 bp, synthetic construct
  source 1..390: mol_type = other DNA; note = Synthetic coding sequence
atggctgaattaatccaaaagaaattgcagggtgaagtggagaagtaccaacagctgcaaaaagacctttctaaatccatgagtggacggcaaaagctcgaagcccaactgacagagaacaacattgtcaaagaggagttggccctgcttgacggtagtaacgtcgtgttcaagctgctgggccctgtcctggttaaacaggagctgggagaggcccgagcgacagtgggtaagaggctcgattatattactgccgagattaagcggtacgagagtcaattacgagatctggagagacagtcagagcagcagcgtgaaactttggcgcagttgcagcaggagttccagcgggctcaggccgctaaagccggtgcaccgggaaaggcttag

SEQ ID NO: 30497 - DNA, 621 bp, synthetic construct
  source 1..621: mol_type = other DNA; note = Synthetic coding sequence
atggctctgaacgttgccccagttcgtgacaccaaatggctcacactggaggtgtgtcgtcaatttcaaagagggacttgcagcagatccgacgaggagtgtaaattcgcccacccccctaaaagttgccaggtggagaacggaagggtcattgcatgctttgactctcttaagggcaggtgtagtcgcgagaactgtaaatacttgcaccccccaacccatttaaaaacccaactggagataaatggccgaaataacctgattcaacagaagactgccgcagctatgttagcccaacagatgcagttcatgttccctgggacacctttgcaccctgtagctttcccccctggggctctgcatcctttgcctaaacggcaggccttagaaaaaagcaatgggacaagcgctgtcttcaatccctccgtgctgcattaccagcaagcactgacatctgcccagctacaacaacatgcggcattcattccaaccgataattctgagatcatcagccggaatggtatggaatgccaggagtcagccctgaggattacaaagcactgttactgtacctactaccccgtttcatccagcattgagcttccccagacagcctgttag

SEQ ID NO: 30498 - DNA, 978 bp, synthetic construct
  source 1..978: mol_type = other DNA; note = Synthetic coding sequence
atgcagcaacctgtcagagctggggatatcggcgtgtcacgcgtgcaaacccaccataatgcttctccattttccgtgcctaagaaacaagacgaaagtcccatgataggagacggggaggattattttctgtccctgtttggagatagcaagaaactaacggctcatagcaactacacccagaaaacgttgaaatacttttccatgatactggaggaggttggccagtttacctctagctccctcggggatgtggaaatagcagaagttaatgtgaagggccttttcgtgaagctcatcaatagcagcctggacaaagagatggccattggtgaccacattctgcagcaaaatgtgaacggccaaacgatatctttataccggttcctccctaatatcgtgatgcaggccaatagcaccgtgactgtctgggccgctgccagtgaggctaagcaccagcctccctcagacttcctttggaaggagcaagataagtttcgcgcttcccccgactgtatcacgatattatgtaagcctaacggccaggctatcgcatggtacacaccaatccactggaaacaggcgtgggaaaaacttgacgccgacgtcgagttcaatcggtgttccgttgtgagcccaacctttcgcaagagagtgttccagtggaccgctagcacagctaccattacgaaggaaaaacaagatcaacccaagaaggacatctccaactatcaggttgagcaggctcaagtgctcttaaaacgcgagaaggagatcccacctactgttttccctaatcggtcaccctggtgccagaacccttacgtttccgcacacccgtattgccctctgatcgaaccccataatacatctactgctggcggtagactggatagacagcccaggacccgctctacacgccctaaccgtgcaagcggttccaagaaaaagaaaacgtctgagagtcagaaacaatag

SEQ ID NO: 30499 - DNA, 1257 bp, synthetic construct
  source 1..1257: mol_type = other DNA; note = Synthetic coding sequence
atgagggaaatcgttcacatccaggcaggacagtgcggaaaccagatcggcaccaagttctgggaggtcatctcggatgagcatggtattgatcctgctggaggatacgtgggtgacagcgccctacagttggagcggattaatgtttactataatgagagctcaagtcaaaaatacgtgcctagggccgctctcgtagacctggaaccaggaaccatggattcagtgaggtctggacccttcggtcagctgtttagacccgacaactttattttcggccagactggtgcagggaataactgcctccagggcttccagctgacacattccttgggcggtggaaccgggtctggaatgggcaccctcctgatcagcaaaataagggaagagttccccgatcgcattatgaatacgttcagcgtgatgccatctcctaaggtcagcgataccgtggtagaaccttacaacgccacattgtcagtgcaccagctggttgagaacaccgacgagacttattgtattgataacgaggctctgtatgatatttgctttcgtaccctgaaacttactacccccacttacggcgacctgaaccatctcgtgtcagcgactatgagcggagtgaccacctccctaaggttcccaggacagctgaacgcggatctccgcaaattagcagtgaatatggtgcccttccctcgcctgcacttcttcatgccaggctttgcacccctaacatcacggggttctcagcagtacagagctctgaccgtacctgaattgacccagcaaatgttcgacgccagaaacatgatggccgcttgtgaccctagacatggtagatacctcaccgtggcaaccgtgttcaggggcccaatgagtatgaaagaagtggatgagcagatgctggcgatccagagcaaaaactcatcttatttcgtggagtggatccccaacaacgtgaaagtggctgtttgcgacataccacctcgcggactgaaaatggcgtcaacattcatagggaactctacagctattcaggagctctttaaaaggatttctgagcagttcagcgccatgttccggcgaaaggcctttctgcactggtttacgggcgaaggcatggatgagatggagttcactgaggccgaaagtaatatgaacgacctggtatccgaatatcagcagtaccaagatgctacagccaacgatggagaggaggcttttgaggacgaggaggaagaaatcgatggctag

SEQ ID NO: 30500 - DNA, 270 bp, synthetic construct
  source 1..270: mol_type = other DNA; note = Synthetic coding sequence
atggacgttctctcacctctgtcattcattaaagtgtctcatgtgcgcatgcagggcatactactcctggtatttgctaagtaccaacacctgccttacattcagatcttgagcaccaagagcactccaaccggtttgttcggatattggggaaataagggtggcgtgaatatatgtttaaaattatacgggtactatgtcagcatcataaattgtcatctaccaccccacatctcaaataattatcaacgcctggaacattttgactag

SEQ ID NO: 30501 - DNA, 180 bp, synthetic construct
  source 1..180: mol_type = other DNA; note = Synthetic coding sequence
atgacccgcggtaatcagagggagttagcaagacaaaaaaatatgaagaaacagtcagattctgtcaagggtaagcgccgtgacgatggactgtccgccgcagccagaaaacagagagactcagagataatgcagcagaagcagaagaaagcaaacgaaaaaaaagaggagcctaagtag

SEQ ID NO: 30502 - DNA, 864 bp, synthetic construct
  source 1..864: mol_type = other DNA; note = Synthetic coding sequence
atggatgaaactgagatagggtcttgttttggtcgctacggatctgtgaaagaagtgaaaattatcacgaacaggacaggagtgtccaaaggatacggctttgttagttttgtgaatgacgtggatgttcagaaaattgtgggcagtcagattcattttcatggaaagaagctaaagcttggtccagccattcggaaacagaagttgtgcgccagacacgtgcagccccgacctctggtggtgaaccctcctccgcctcctcagttccaaaacgtctggcggaatcccaataccgaaacatatctgcagccccagataacgcccaaccctgtgacgcagcatgttcaggcttatagcgcttatccccactctccgggtcaagtgatcactggctgtcagctgcttgtctataactatcaggaataccctacttacccggactcggcatttcaggtgaccaccggataccagctgcctgtttacaactatcaacccttcccagcataccctagaagtccattccaggttaccgccggttaccagctgcccgtctataattatcaggctttcccagcgtacccaaattctccttttcaggttgctactggataccagtttccagtttacaattaccagccttttccagcttacccttcctcgccatttcaagtaacagccggataccagctgcccgtgtacaattatcaagccttcccagcttatcccaattcgccttttcaggttgccacaggatatcagtttccagtctacaattatcaggccttccctgcatatcctaattcacctgtgcaagtgacaactgggtaccagctgcccgtgtacaattaccagaaattcccatag

SEQ ID NO: 30503 - DNA, 1344 bp, synthetic construct
  source 1..1344: mol_type = other DNA; note = Synthetic coding sequence
atggatatgggaaatcaacatccctcgatttctcggcttcaggagatacagaaagaggtgaagtcagtggagcaacaagtgatagggttttctggcctgagcgacgacaaaaactacaagaaactggagagaattctcacaaaacagcttttcgagatcgatagcgttgatactgagggcaaaggagacatccagcaggcaagaaagcgcgcagcccaagagaccgagcgactcttgaaagagcttgagcagaatgcaaaccaccctcatcggattgagatccagaacatttttgaggaggcccagagtctcgtgagagaaaagatcgtgcccttttataacggtggcaattgcgtcactgatgaattcgaagagggcattcaagacattattctgcgtttgacacatgtgaagaccggtggcaagatcagcttgcgcaaggctcggtaccataccctgacaaagatctgcgctgtgcaggagatcatcgaggattgtatgaagaaacagcccagccttcctctatccgaggatgcgcaccccagcgtagctaaaattaattttgttatgtgtgaggtcaacaaagcccgtggcgttcttatcgccctgctgatgggcgtgaataacaatgaaacctgccggcaccttagttgcgtgttgtcgggactgatcgccgacctggacgctctcgatgtgtgtggccgaacagagattcgtaactaccgacgcgaggtggtcgaagacattaataagttgctgaaatatctggatttggaagaggaagcagataccacaaaagccttcgacctgcgccaaaatcattctatcctcaaaattgagaaagttctcaagaggatgagggagatcaagaatgaactactgcaagcccagaatcctagtgagctttatttgagcagtaaaaccgaactgcagggactgatcggccagcttgacgaagtgagcttggaaaagaatccatgtatccgggaggcccgacggagagctgttatcgaagtgcaaaccctgatcacatacattgacctgaaggaagctctggaaaagcgcaaattatttgcgtgcgaagagcaccctagccacaaagctgtgtggaacgtgctggggaatctttcagagattcaaggcgaagtactctctttcgacggcaacagaaccgacaaaaactatatccggctggaagagttactgactaagcaactgctggctctggacgccgtcgatccgcagggggaggaaaagtgcaaggcagcaagaaaacaggcagttagattagcccagaacatactaagctacctcgatctgaaatctgatgagtgggaatattag

SEQ ID NO: 30504 - DNA, 474 bp, synthetic construct
  source 1..474: mol_type = other DNA; note = Synthetic coding sequence
atggctaacatcgcagtgcagagaatcaagcgcgagtttaaggaggtcctgaagagtgaggaaacatcaaagaaccagatcaaagtggacctcgtggacgagaacttcaccgagctgcggggtgagatcgccggtccaccggacacaccctacgaaggcggaagataccagctggagattaagatacctgagacttaccccttcaaccctccgaaggtccggttcattaccaagatctggcacccgaatatatcctccgtgactggcgcaatttgtctggacattcttaaggaccagtgggcagcagctatgacccttcggaccgtgctgctaagtctgcaggcactcctcgcagccgcagaacccgacgatccacaggacgccgtggtcgctaatcagaatgccgttatcgtagccttgtcatctaaatcctgggacgtagaaaccgcaactgagctgttgttgagtaactag

SEQ ID NO: 30505 - DNA, 582 bp, synthetic construct
  source 1..582: mol_type = other DNA; note = Synthetic coding sequence
atgccaactacgtcccgccctgcactggatgtgaagggtggtacaagccccgctaaggaggacgcgaatcaagagatgtcttctgtggcatattccaatcttgccgtgaaagatcggaaagctgtggcaatcctccattaccccggtgttgcatctaatggcacaaaggcctctggtgcacctacaagttcaagtggaagccccatcggcagtccaacaacaactccacccacaaagcctccatctttcaatctgcaccctgctccacacctgctcgctagtatgcatctgcagaagctaaattcacagtaccagggcatggccgctgcgactcctggacaaccaggagaggctggcccattgcaaaattgggatttcggggctcaggcaggcggtgccgaatctctttccccctcagccggtgcgcagagcccagcgatcatagactcggatcccgttgatgaagaagtcctgatgagcctggtagtcgaattgggcctagaccgggcaaacgagctccccgagctttggctggggcagaatgaattcgatttcacggcggactttccttcttcttgttag

SEQ ID NO: 30506 - DNA, 1188 bp, synthetic construct
  source 1..1188: mol_type = other DNA; note = Synthetic coding sequence
atggcgtctgcagcctctgtgaccagcctcgccgatgaggtaaactgtccgatctgccaagggacattgagagaaccagtgactatcgactgcggtcacaatttttgtcgggcatgtctcaccaggtattgcgagattcccggacccgatctggaggagtcacctacgtgccctctgtgcaaagagccgttcagacccggaagcttccgacccaactggcagttggcgaacgtcgtggagaatatagaacgtctccagcttgtctcgactctaggactgggtgaagaggatgtttgccaagagcatggtgaaaagatttacttcttctgcgaggatgacgagatgcagctgtgtgtcgtgtgtcgggaggcaggggaacacgcaacacataccatgagattcctggaggatgccgcagccccttaccgggaacagatccataaatgcttgaaatgtctacgcaaggaaagggaggagattcaagagatccagtccagagagaataaaagaatgcaagtcctgctcactcaggtgagcacaaaaaggcagcaggtgatctcagaattcgcccacctacggaagttcttggaagagcagcaatcaatcctgctggcccagttggaatctcaggatggagatattctgaggcagcgcgacgagtttgatctcctggtcgcaggcgagatttgccgcttctctgccctgatcgaagaactggaggaaaaaaacgagcggccagcaagagagctgcttactgatattcggtctacattaattaggtgtgaaacccggaagtgtcggaaacccgtcgccgtgtctcctgagttgggacagaggattcgggacttcccgcagcaggcattgcccctccagcgcgagatgaaaatgtttttggagaaactctgctttgaactggactatgagcccgctcacatttcgctcgatccacagacatcacaccccaagctgttgttgtctgaggaccatcagagagcccagttttcttataagtggcagaattcacccgataaccctcagcgctttgatcgagctacttgcgtgcttgcgcacaccggaatcacaggcggacggcatacctgggtttggatggccagggtgccaggcgattccggttgctgccagttctgttccccgccttccgtgctggggacagaagtggcagcctag

SEQ ID NO: 30507 - DNA, 624 bp, synthetic construct
  source 1..624: mol_type = other DNA; note = Synthetic coding sequence
atgaccgaagattctcagcggaatttccgtagcgtttactatgaaaaggtaggttttaggggtgttgaggagaaaaaaagtctggagatcctcctgaaggacgaccggctcggtattctgcccccacaccacgagtcccatgccaaggtgatgatgtataggaaagagcagtacctggatgtcctgcacgcgttgaaagtggttcgctttgtgtcagacgctactccacaggctgaagtctatctccgtatgtatcaattggaaagtgggaaactgccccgatctccttcttttccactcgagccagatgatgaggtgttcttggccatcgctaaggcgatggaggagatggttgaagacagcgtagattgctattggatcaccagacgatttgtgaaccagctgaatactaagtaccgcgatagcctcccccaattacccaaggctttcgagcagtacctcaatctcgaggatgggcgactccttacccaccttcggatgtgctcagccgctccaaagttaccatacgacctgtggtttaagaggtgtttcgccggatgcctgccggaaagttccttacagcgggtatgggataaagtggtgagtggctcttgcaagatttag

SEQ ID NO: 30508 - DNA, 1404 bp, synthetic construct
  source 1..1404: mol_type = other DNA; note = Synthetic coding sequence
atggctagcttattgcagtctgaccgggtgctatatctcgtgcagggcgagaagaaggtccgcgcacccctgtcacagttgtacttctgtcggtactgctccgagctgcgctcactggaatgtgtgagccacgaggtcgactcccattattgtccgagctgcctcgagaacatgccctctgctgaggccaaattaaagaaaaatagatgcgctaattgcttcgactgccccggatgcatgcacactttgtccacacgagcaacaagcatatccacgcagctgcctgacgaccccgcaaaaaccacaatgaagaaggcttattatttggcttgcgggttctgcagatggacgagtcgcgacgtgggcatggcagataagagcgttgccagcggcggatggcaagagcccgaaaacccccatacacagaggatgaataagttaattgaatattaccagcagttagcccaaaaagagaaagtcgagagggacaggaagaaactcgcacgacgtagaaattatatgccactggcatttagccaacacacaatccacgtggtagacaagtacgggttaggaacaagactgcagcgaccacgagctggcgcttctatctccactttggctggtctgagcctgaaggagggagaagatcaaaaagagatcaagattgagccggctcaggctgttgacgaggtggagccccttccagaggactactacacccggccagtcaacctgactgaagtgaccaccctgcagcagagactgctacaacctgactttcagcctgtgtgtgccagtcaactgtatccgagacataaacatttgcttatcaaaaggtcacttagatgcaggaaatgtgaacataacctgtcaaagcccgaatttaaccccacaagcattaagtttaagatacagctcgtggcagtcaactatatccccgaagtacggataatgtcaatacccaacctgcgatacatgaaggagtcccaagtgctgctgactctgacgaaccctgtcgaaaacctcacacacgtaaccctctttgagtgtgaggagggtgatcctgatgatatcaacagtactgccaaggtggtcgtcccacctaaggaactagtcctggccggaaaggacgctgccgcagagtacgacgaactggctgaaccgcaggacttccaagatgaccctgacatcatcgcctttcggaaagccaacaaggttggtatctttataaaggtgacgccccaaagggaagagggagaggttactgtgtgtttcaaaatgaaacacgactttaagaacctcgctgccccaatcaggccaattgaggagagcgaccagggaacggaggtgatatggttgactcagcatgtcgaactgagcctcggaccactgctgccttag

SEQ ID NO: 30509 - DNA, 435 bp, synthetic construct
  source 1..435: mol_type = other DNA; note = Synthetic coding sequence
gtcagggagctggaggccgagcttgacgcggaacaaaagaaacatgccgaagccctgaaaggcgtgaggaagcacgagaggagggtaaaggagttagcatatcaagcagaggaggatagaaagaatctcgccaggatgcaagatcttgtcgacaaactccaatcaaaggtcaagtcatacaaacgacagtttgaagaggctgtgtcagctctcgggccaggacacctggatcgcgcaccccagttgtgtcctagagtatgcgggcaggagcagcaagcgaataccaacttggcgaagtatcggaaagcccagcacgaactggacgacgccgaagagagagccgatatggcagagacacaggccaataaactgagggctagaacccgggatgcgctgggaccaaaattgtcactgtctcctcagcataaggagtag

SEQ ID NO: 30510 - DNA, 747 bp, synthetic construct
  source 1..747: mol_type = other DNA; note = Synthetic coding sequence
atggcaacttccgccccactgagatcccttgaagaagaggtcacatgctctatctgtctcgactacctgcgggatcctgtaaccatcgactgtggacacgtattctgccggagctgtacaactgacgtacgaccaatctccggttcccgacctgtgtgtccactctgtaagaagcctttcaagaaggaaaatataagacccgtgtggcagctcgcctctctggtggagaatattgaacggctcaaagtggacaaaggcagacagccaggcgaggttacaagggagcaacaggacgcgaagctttgcgagaggcaccgcgagaagctgcactactactgcgaagacgatggcaagttactgtgcgtgatgtgtcgcgaaagccgggagcaccgcccacatacggcggttttaatggagaaagctgcacagcctcatagggaaaaaatacttaatcatctgagtactctcaggagagacagggataaaatccaggggtttcaggccaagggtgaggccgacatcctggcagcgttgaagaaactacaggatcagaggcagtatattgttgcagagtttgaacagggccaccagttcctgcgtgaaagagaagagcacctgctggagcagttggcaaagcttgaacaggaactcaccgaaggtcgggagaagtttaagagccggggtgtcggggagctcgctcgattggccctcgtgattagtgagctggaggggaaggcacaacagtag

SEQ ID NO: 30511 - DNA, 3468 bp, synthetic construct
  source 1..3468: mol_type = other DNA; note = Synthetic coding sequence
atggcagcaagtcgcgatctgctcaaagaatttcctcaacccaagaatttgttaaactccgtgataggccgtgctcttggcatctcacacgcaaaggacaagctggtgtatgtacatactaatggcccaaagaaaaaaaaggttactctgcacatcaagtggccgaaatctgttgaggtagagggttacggatccaagaagatcgacgcggagcgccaggctgcagccgctgcctgtcagctgttcaaagggtgggggctgcttggtcctcggaatgagctgttcgatgcagctaaatacagggtcctggcggatcgctttggctcgccagccgattcttggtggagacccgaaccaacgatgcccccaacttcttggcgtcaactcaatcctgaaagtattcgcccaggcggacccggaggactgtcaaggtcacttggcagagaagaggaggaagatgaagaggaggagctagaagaaggcacaattgatgttacagactttttgtccatgacccagcaggactctcacgccccactgagagattcaagggggagctcatttgaaatgactgacgacgattcagctattagggcactcacccagtttcccctgcctaagaacctgttagctaaagtgatccagatagcaacatcgagcagcaccgctaagaatctgatgcagtttcacacagtgggcacaaaaaccaagctgagtaccttgactctgctttggccctgtcctatgaccttcgttgcaaaaggccgtcgcaaagcagaagctgaaaacaaggcggcagctcttgcctgtaaaaaattgaagtccctcgggttggtcgatcggaacaacgaaccactgacacatgccatgtataacttagccagcctgcgcgaactgggcgagacacagagaaggccctgtactatccaggtcccagagccgattctccgtaagattgagacatttttgaaccactatccggtcgagtccagctggatcgccccagagctgcgactccaatctgatgacatcctgcctctgggcaaagattcaggcccactgagtgacccaatcacgggcaagccgtacgtgcccctcctcgaggctgaagaggtaaggctcagccaatcactcctcgagctttggcgacgtcgcggtcctgtctggcaagaggcaccacagttgccggttgacccacatcgggatactatactgaacgccatcgaacaacatcctgtcgtggttataagcggagacacagggtgcggaaaaaccactcgcatacctcaactgctcctggagcgttatgttaccgaaggtcggggagcacggtgtaacgtgattattacccaaccccgtagaatctctgcagttagcgtggctcagagagttagccatgagcttggcccatctcttcgaaggaacgtgggctttcaggtgagactggagtcaaagccaccaagccggggtggagctttgcttttctgtactgtgggaattctcctgcgaaagctccagtctaacccctccttagagggcgtctcacatgttatcgttgacgaggtacacgaacgcgatgttaacacagacttcctgttgattcttctcaaaggcctgcaacggctcaaccctgcactgcgcttagtgctcatgtcagcgaccggagacaacgagaggttctctagatacttcggcggatgtccagttattaaagtgccaggctttatgtatcccgttaaagagcattatctggaagatatcctggccaaactggggaagcatcagtacttacataggcaccggcaccatgagtccgaggacgagtgcgctctcgatctcgatctggtgaccgatctggtgttgcatatcgacgcccgaggggagccaggaggaattctgtgcttcctccccggatggcaggaaatcaagggtgtccaacagcgcctgcaggaagcgctcggaatgcatgagtcgaagtacctgatcctgccagtgcattccaacattcccatgatggatcagaaagcaatcttccaacagccccctgttggtgtgcgaaaaattgtgctcgcgaccaacattgcagaaaccagcatcactattaacgacatcgtgcatgtggtggatagtggcctgcataaggaagaaagatacgacctgaaaacaaaagtcagttgtctggagactgtgtgggtctcacgggctaatgttatccaaaggcgaggacgggctggtagatgccagtccgggtttgcctatcatttattccctcgctcccgtctggagaagatggtaccattccaggtccccgagatcctgcgcactccactagaaaatctagtgctgcaagccaaaatacacatgccagaaaagaccgcggtcgagttcctgagcaaggccgtggacagcccaaatatcaaggcagtggacgaagctgtaatcctgctgcaggaaattggggtgctggaccagagggagtatctgacgacgctgggacagagactggctcacatctccacagacccaaggctggccaaggctatcgtcctggctgctatctttagatgtcttcaccctctgctggtagtggtgtcttgcctcacaagggatcccttctcatcaagccttcagaacagagccgaggtggataaggtcaaggctcttctgtctcacgactcaggttcagatcacctggcttttgtgagggctgtggccggatgggaggaggtgctgcgctggcaggatagaagcagtcgcgaaaactatctggaggaaaatctcctgtacgctccctcacttagattcatccacggattgatcaagcagtttagcgagaacatatatgaggccttcttggtgggcaagcctagcgactgcacgcttgcttcagcccagtgcaacgaatactctgaggaagaggagcttgtgaaaggcgtgctcatggctgggctctatcctaacctgattcaggtgagacaaggcaaggtgacacgccaagggaaattcaaacctaacagtgtcacctacagaaccaagagtgggaatatcctgctgcacaaatccaccatcaaccgagaggccacacggcttagaagtaggtggttgacctatttcatggccgtgaaatctaacggaagtgtctttgtgcgtgactcgagccaagttcatccgctagctgttctgctgctgaccgatggggatgtgcacatccgagatgatggtaggcgtgccactatttctctcagtgattccgaccttctgaggctggaaggtgatagtcgaacagtcagactgcttaaggagctacggagagcccttggtaggatggtggaacgatctctacggtcagagcttgctgcacttcccccatccgtccaggaagaacatgggcagctgctcgccctcttggcagaactgctgcgcggaccctgtggttccttcgatgtgcgaaaaaccgccgacgactag

SEQ ID NO: 30512 - DNA, 762 bp, synthetic construct
  source 1..762: mol_type = other DNA; note = Synthetic coding sequence
taggtcggggtcgaggcagctagggtaatcgcgaaggctctggagaaaaagtctgagctgaagcggtgccattggtctgatatgtttacagggaggctgcgtacggaaatcccccctgccctgatctcactaggagaagggcttattaccgctggggctcagctggtggaactggatctgtcagacaacgcctttggacctgacggagtccaaggattcgaagccctgttaaagagctcagcttgttttactcttcaggaactgaagcttaataactgcggaatggggatcggaggcggtaaggtgatcgggaccctggaagaagtgcatatgccccaaaatggaataaatcaccccggaatcacggccctcgcccaggccttcgccgttaaccccttgcttagagtgataaatctgaacgataacacattcaccgaaaaaggagccgtagcaatggccgagactctgaagactttgcgccaggtggaggtgatcaatttcggtgactgccttgtgaggagtaagggagcggtggctatcgcagacgctatccgcggaggtctgccaaagctcaaggagctgaatctgtccttttgcgagataaagcgcgacgctgctcttgctgtcgccgaggctatggctgacaaggccgagctggaaaagttggacctcaatgggaacacactgggcgaggaaggctgcgaacagctccaggaggtcctcgagggtttcaacatggcaaaagtactcgctagcctttag

SEQ ID NO: 30513 - DNA, 3735 bp, synthetic construct
  source 1..3735: mol_type = other DNA; note = Synthetic coding sequence
gacgtgggcggagataggccttgggactcgggcaacacccagctgccacctcgaaaccccgtaaaggctaacgcgatgttcggcgctggcgacgaagatgataccgacttcctgtcccctagcggaggagctagactggctagcctcttcggtcttgaccaggctgcagctggccatggaaatgagttttttcaatacaccgcgcctaaacagcccaagaaaggacagggcaccgcggctactgggaatcaggcaactccgaagaccgcaccagccacaatgagcacccccactattttagtggcaaccgcggttcacgcctatcggtacactaatgggcagtacgtgaaacaggggaagtttggggctgccgtcctcggcaatcacacagctagggagtatcggattctactgtatatctcacagcaacaaccagtgaccgtggctagaatccatgtcaactttgaattaatggtgaggccaaataactactctactttctacgacgaccagcgtcagaattggagcattatgttcgaatctgagaaagcggctgtggaatttaacaagcaagtctgcatcgctaagtgtaattcaacctcatctctggatgcagtactatcacaggacctcattgttgctgatgggccagccgttgaggttggtgactcgctggaagtcgcatacacaggatggctttttcagaaccacgtgctggggcaagtgtttgacagcactgccaataaagacaaattgctgagactgaagctggggtctgggaaggtgataaagggttgggaagatggcatgctgggaatgaaaaagggaggtaagaggctactcatagtaccccctgcatgcgcagtgggcagcgaaggcgtgatcggatggactcaggccaccgacagtatcctcgtgttcgaagttgaggttaggagggtgaagtttgctagggatagcggctcagatggtcactcagtttcaagtcgggacagcgctgccccatccccaatccccggtgccgataacctctctgctgatccggttgtgtctcctccaacgtcgatccccttcaagagcggcgaacctgctctgcgcaccaaatctaactcactgtccgaacagttggctatcaacacttcaccagatgcagtcaaggcaaagctgatcagtcgtatggctaagatgggccagccgatgttacccatcctgccaccccagctggatagtaatgactcggagatcgaggacgtgaacacactccagggcggaggacagccggtggtgaccccctccgtgcagcccagcctgcatcccgcacaccccgctctgccacagatgacttctcaggccccacagccaagcgttactggacttcaggcacccagcgcggcattgatgcaggtgtcttctctggactcacacagtgctgtttcaggcaacgctcagagctttcagccatatgctggaatgcaagcttatgcctacccccaggcatcagctgtcacttcccaactccaaccggtgcgtcccctatacccagcaccacttagccagccgccacacttccagggctccggcgatatggcgtctttccttatgaccgaagcacgacagcacaacacggagattcgcatggccgtgagcaaggtcgccgacaaaatggatcacctgatgaccaaggtcgaagaactacagaaacacagcgccggtaatagcatgctgatcccaagcatgtcagttacaatggagacctcaatgatcatgtcaaacattcagcgtatcatccaggagaacgagcgattgaaacaggagatccttgagaagtccaacagaattgaggagcaaaacgacaagatttcagagctgatagagaggaaccagcggtatgtcgagcagtccaatttgatgatggaaaagcggaacaacagcctacagaccgctacagaaaatacacaagccagagtgcttcacgctgagcaggaaaaggcgaaggtcaccgaagaactagcagcagccactgctcaggtatcccacctccagcttaagatgactgcgcaccagaagaaagagactgagctccaaatgcagttgacagaaagtcttaaggaaacagacctgttgagaggacaattgaccaaggttcaggcaaagctgagcgaattgcaagaaaccagtgaacaggctcagtccaaatttaagagtgagaagcagaaccgtaaacaacttgaactcaaggtcacctctctcgaagaagaattgactgatttgcgggtcgaaaaagagagcttagagaagaacctgagtgagagaaaaaagaagtccgcccaagaaagaagtcaggctgaagaggagatcgatgaaatacggaaaagctaccaggaagagctagataagctgagacagctgctgaagaagacaagagtttccaccgatcaagcggctgctgaacagcttagtctggtccaggctgaactccagacccagtgggaagccaaatgtgagcatctgttggctagcgcaaaggatgaacatctgcagcaatatcaagaagtttgtgcccagcgggacgcctaccaacagaagctggtgcagttgcaggagaagtgccttgctctccaggcacagatcacagcgctaactaagcagaatgagcagcatattaaggagctggagaagaacaaaagccagatgagcggagttgaagcagcagcttcagaccccagcgagaaagtgaaaaaaattatgaaccaagtatttcagagcctccgtcgcgaatttgaactcgaagagagttacaacgggaggaccatcttggggacaatcatgaacacaattaagatggtcactctgcaactcctgaatcaacaggagcaagagaaggaagagtcaagttctgaagaggaggaggagaaagctgaagagcggccacgcaggcccagccaggagcagagcgcctccgcttcatcaggccagcctcaggcccctttaaatcgagaaagacctgagtctccaatggtgccctctgagcaggtggtcgaagaagccgttccactgcccccacaggccctgactacgtcgcaggacggccacagacgcaagggagactccgaggctgaagccctcagtgagataaaagatggctctctgcctcctgaattatcctgcataccgagtcacagggtgttggggcctccgaccagcattccccctgagccacttggacctgtaagcatggattcagaatgcgaggagtctctagctgcatcacctatggcggcaaaacctgacaatccttccggaaaagtttgcgtgagagaggtagctccagatggcccactccaagagtcatcaacacgtctctcccttacctccgacccagaggaaggagaccctctggccctggggcctgaatcccccggagagccacagccccctcagttgaagaaagacgacgtcactagctcaacaggtcctcacaaagagctgagtagcactgaagccggtagcaccgttgctggagccgcactacggccatctcaccatagtcagcgaagttctttgtcaggagacgaagaagatgaacttttcaagggtgctacacttaaggcactacggcctaaggcccagcctgaagaggaggatgaggacgaagtgtcgatgaaagggcgtcccccaccgacacctttattcggagatgacgacgatgatgatgatatagactggctcgggtag

SEQ ID NO: 30514 - DNA, 1653 bp, synthetic construct
  source 1..1653: mol_type = other DNA; note = Synthetic coding sequence
atgaagtgggaagagtacgaagaactgctgcattatgcaatagtcacccctaacatcgaaccatgtgccagccagtcttctcaccccaagggggaacttgtgccagatgtgcgtatatccactatccacgacatactccacagtcagggcaacaatagcgaggttcgggagacagcgattgaagtggggaaggggtgcgatttccacatctccagccatagtaaaactgacgaatcatctccagtcctttcccctcgcaagccttcacaccccgtcatggattttttttcaagccacttactcgcggactcatcgtcgcctgctacaaattcaagccatacagacgcacatgagatcctggttagcgatttcctggtgtccgatgagaacctgcagaaaatggaaaatgtactcgacctatggtctagtggattgaaaacgaacataatcagcgagctgtctaaatggcgactgaactttattgactggcaccgcatggagatgaggaaagaaaaagagaagcatgctgcccacctcaaacaactctgcaaccaaataaacgagttaaaggagctgcagaagaccttcgaaatatccatcggccgtaaagatgaagtcatcagctctctgtcccacgctatcgggaaacagaaggaaaagatcgaactcatgaggacgttctttcattggcggatcgggcacgtgagggcacgtcaggacgtgtacgaaggcaaactggccgaccaatactatcagaggaccttactgaagaaagtctggaaagtttggcggagcgttgtccaaaaacaatggaaagatgtcgtcgagcgagcctgtcaggcaagagcggaggaggtatgtattcagatctcaaacgattatgaggcaaaagtcgccatgctctcaggcgctctggaaaacgccaaagcagaaatccagcggatgcagcatgaaaaagagcatttcgaagattcaatgaaaaaggccttcatgcgcggagtgtgtgccctgaatcttgaggctatgaccatcttccagaatcgaaacgatgctggcatagacagcaccaacaataagaaagaggagtacggcccaggagtccaagggaaagagcattcagctcacctcgacccctcagccccacctatgccactgcctgtcactagtcctttgcttcccagtcctcctgctgcagtaggtggcgcttcagccactgccgtgccgtccgccgctagtatgacgtcaactcgggctgcttctgcttcttcagtgcatgtccctgtcagcgcacttggcgctggatcagctgccaccgccgctagcgaagaaatgtatgttccaagggttgtgacgtcagcccagcagaaggccggtcggacgattacagctcgaataacaggcaggtgtgatttcgccagtaaaaatagaattagtagcagccttgcaattatgggcgtgagccccccaatgtcctccgtggtcgttgaaaaacaccatcccgtaaccgtgcaaacaattccccaagccacagccgctaagtatccaaggactatccaccccgagtccagtaccagcgccagccggagcttaggaacaaggtcagctcacacgcaatcacttaccagtgtgcactcaatcaaggtggttgattag

SEQ ID NO: 30515 - DNA, 402 bp, synthetic construct
  source 1..402: mol_type = other DNA; note = Synthetic coding sequence
atgtctccaagccagatgatcatgcccaacgtcatggagatgatagcagccctggggccaggaccaagcccttacccactgccccctccacctggagggacgaactcaaacgactattcctcccagggtaacaattatcagggccacggtaatttcgacttcccccatgggaaccccggtggcacctcaatgaacgacttcatgcacgggccaccacaactgagccatcctccagacatgccaaataacatggctgcactagagaagcctctgagtcatccaatgcaagaaacactgcttccagagttaacaaatcccgacgaactgctgagctacctcgacccacccgacctgccgtccaattcaaacgatgacctgctatccctgttcgaaaacaattag

SEQ ID NO: 30516 - DNA, 1473 bp, synthetic construct
  source 1..1473: mol_type = other DNA; note = Synthetic coding sequence
atgtcaagctgtgtaagctcccaaccttccagcaaccgagccgctcctcaggatgagctgggtgggagaggcagctcatcctccgaaagccagaagccatgcgaggcgctcagggggctgtcatcattgtctatacatctgggaatggagtccttcatcgtggtgacagaatgtgaaccaggctgcgcagtggaccttgggctggcacgtgacagacctctggaggctgacgggcaggaagtcccactggacacaagcggcagccaagcacggcctcacctgagtggcagaaaactgtcattacaagaaaggagccagggcggactcgccgcaggaggttcactggatatgaatggtcgttgcatctgtccatcgttgccctattcacctgtgtcgagtcctcagtcctcccctaggctccctcggaggccaactgtggagagtcaccatgtgtcaattactggcatgcaggattgcgtacagttgaaccagtatactttgaaggatgagattggcaagggaagttatggtgtggtgaagcttgcctacaacgagaatgacaatacttactatgctatgaaggtactgagtaagaaaaaacttattcgacaggcaggcttccctcgcaggcctcctccacgaggcacccgccctgccccaggtggttgtatccaaccaagagggcctatcgagcaggtctatcaggagatcgcaatactcaagaaactggatcaccctaatgtggtgaaactggtagaagtgctggacgatcctaatgaggatcacctctacatggtcttcgaattggttaatcagggcccagtcatggaggttcccacactcaagccattgtcggaagatcaagcccgattctacttccaggacctgattaaggggatcgagtacctgcattaccagaaaattatccacagggacatcaagccaagtaacttgcttgtgggagaagacgggcacatcaaaatcgctgactttggtgtcagcaatgagtttaagggttctgacgccctgttgagcaatactgttgggaccccggctttcatggcgccagagtccttatccgaaactaggaaaatcttctccggaaaggcactcgacgtttgggcgatgggagtgaccctgtactgtttcgtatttggccagtgtcccttcatggacgaacggatcatgtgccttcactccaaaattaaaagtcaggcactcgagttcccagaccaacccgatattgcagaagacctcaaagatctgatcacaagaatgttagacaagaatcctgagagtcggatcgtggtgcccgagatcaagatactggtgaagaccatgatcagaaaaagaagctttggcaatccattcgaaggtagccgtagggaagaaaggagtcttagtgcgccaggcaatctgctaacgaaaaagccgactagggagtgtgagtcactgtcagaactgaagacttag

SEQ ID NO: 30517 - DNA, 1872 bp, synthetic construct
  source 1..1872: mol_type = other DNA; note = Synthetic coding sequence
atggccgctgctactggcgatccaggactgtccaaacttcaattcgcacctttctcttctgccctggatgttggattctggcacgagctgacccaaaaaaagctcaacgaataccgcttagatgaggcgccaaaggatattaaagggtattactataatggcgattcagccggactgcccgcacgcctgacattggagttctcagcatttgatatgtctgcacccactcccgcacgatgctgtccagccatcggcacactctacaataccaatactctcgagagttttaagactgctgacaagaagctgttgcttgaacaggccgctaatgaaatctgggaaagtatcaagtcaggtaccgcattggaaaacccagtgttattgaataaatttttgcttctgaccttcgcgatcgaggccctggagtgtgcttacgacaatctatgtcaaacagagggtgtaacagcactgccctattttctaatcaagtacgatgagaatatggtgctggtttccctgctgaaacactattcagattttttccaaggacagcgcaccaaaatcactattggggtatatgacccatgtaacctggcccagtatcctggatggcctctgcgcaactttctcgttctggccgcacaccgctggagttcttccttccaatcggtggaggtggtgtgctttcgggaccgcacaatgcagggcgcaagggatgtcgcccatagcattatcttcgaggtgaagttaccagaaatggccttttcccccgattgccctaaagcagtcggctgggaaaagaaccagaaggggggaatgggtccaagaatggtcaacctctcggagtgcatggatcccaagcgcttagccgaaagttctgtcgaccttaaccttaagctgatgtgttggaggctggtccccacgttggatctcgacaaagtcgtgagcgtgaagtgtttgttgctgggcgctggtactcttggatgcaacgtggctagaacgctcatgggatggggtgtcagacacattacttttgtcgacaatgctaaaatcagctattcaaatcccgtgcgacagcctctgtacgaattcgaggactgtctgggagggggtaaaccaaaagcgttagccgctgcggatcggcttcagaagattttccctggtgtcaatgccagagggtttaacatgtcaattcccatgccagggcaccctgtgaatttctcatctgtgactcttgagcaagccaggagggatgtcgaacagctggagcagctgatcgagagccacgacgtggtgtttctgttgatggacactcgggagtccaggtggctgcccgctgtgatagcagccagtaagaggaagctggttataaatgccgcattgggtttcgacacatttgtcgtgatgagacacggcctcaagaagcctaaacagcagggggcaggagacctctgccctaaccatcctgtggcatctgctgatttgttgggaagctctcttttcgcaaacattccaggatacaagcttggctgttatttctgcaatgatgtagtggcacctggcgactcaacgagggaccggaccctggatcaacagtgtactgtaagccggccaggcctggccgttatcgccggtgcactggccgttgagctcatggtgtctgtgctccagcatccagagggaggctatgcgatcgcatcaagtagtgacgatcgaatgaatgaacccccaacctccctgggccttgtgccccaccaaatacgagggttcctctctcgattcgataacgtcctgcccgtttccctggcctttgacaagtgcactgcctgcagctccaaaatctgggacatgtcagacgatgagacaatatag

SEQ ID NO: 30518 - DNA, 966 bp, synthetic construct
  source 1..966: mol_type = other DNA; note = Synthetic coding sequence
cggaggaatgtggagttaatcaacgaggaggccgcaatgttcgacagtctgttaatggattcctatgtgtcttccactacgggcgagtcagtgattacccgggaaatggtggaaatgctgttttccgatgactcagatctgcagctggcaacaactcaaaaatttcgcaagttgctctctaaggaaccatcccctccaatagacgaggtcattaatacgcctagagtcgttgatcggttcgtcgagtttctcaaaaggaacgagaactgtacccttcaagccgtatgggcactcgggaacattgccggtgactcttcggtctgtcgcgactatgttttgaactgctctattttgaacccactgctcacgcttctgacaaagtccaccagactgactatgacacgcaatgccgtctgggccttgagcaatctgtgtcgcggaaagaatccccctcccgagttcgccaaggtcagtccctgcctccccgtactgagccggctactgttctcttctgatagcgatttgctggccgatgcctgttgggctttgagttacctgagcgacgggcctaacgaaaaaatacaggcagtcattgatagtggagtgtgtagacgtctggtggagttattaatgcacaacgactacaaagtggcctccccagcattacgcgcagtgggaaacatagtgacaggggacgatattcagactcaggtcatcctgaattgcagcgctctcccatgcctgcttcacctcctgtcttcccccaaagagtccataaggaaggaggcatgttggactattagcaacattactgctggcaatagggcccagatccaagctgtcattgatgctaatatctttccggtgctcatcgagatcctgcagaaggccgaatttcgcacaagaaaggaggctgcctgggctattactaacgccaccagcggtgggacacccgaacagatatag

SEQ ID NO: 30519 - DNA, 795 bp, synthetic construct
  source 1..795: mol_type = other DNA; note = Synthetic coding sequence
atgggcggagctcagttagaactgccaagcggtgcaagacccggagtgtgtgtgaggagaagcttccgggcacacgctggggatcagcctcggagacctcctggccctattcccgtgccgggaactatgaaacaggaaagcgctgcccctaacaccccccctacgagccagtcaccaaccccttctgctcagttcccccgtaatgatggagatccccaggcactttggattttcgggtacggatctttggtctggcgcccagatttcgcttattcagatagccgtgtggggttcgtccgcggatattcaagaagattctggcagggtgacacgttccacagaggttcagacaagatgcccggacgagtcgtgactcttctggaagatcacgagggttgtacgtggggggtggcgtaccaagtccagggagagcaagttagtaaggcactcaagtatctgaacgtgagggaggctgtgctcggaggatatgatactaaggaggttaccttttatcctcaggatgctcctgatcaaccactgaaagcccttgcatacgtcgcgacacctcagaaccccggataccttggacccgctcctgaagaggccattgcaactcaaatcctggcatgccggggtttctcaggacacaacctggagtatctactgcggctcgcggactttatgcaattgtgcggccctcaggctcaggatgagcatctggctgcgattgttgatgctgttggtactatgctgccgtgcttctgccctacagaacaggccctagccttagtgtag

SEQ ID NO: 30520 - DNA, 747 bp, synthetic construct
  source 1..747: mol_type = other DNA; note = Synthetic coding sequence
atggcgacgagcgcccctctgcgatccctcgaggaggaggtgacgtgtagcatctgtctggattacctgcgggacccagttaccatcgattgcggccacgtattctgtcgaagctgtactactgacgtccgcccaattagtggttctcgccctgtttgcccgctttgcaaaaaacctttcaaaaaagaaaatatcaggccggtatggcaactggcaagtctggttgagaatatcgagcggttgaaggtggacaaaggtcggcaacccggagaagtgactagggagcagcaggatgcaaaactctgcgagaggcacagggagaagctacactactactgtgaagacgatgggaaactcctctgtgtaatgtgccgagaaagccgggagcataggcctcacacagctgtgttaatggagaaggctgcacagccccatcgggagaagatcttgaaccacttaagtactctacggagagatagggacaaaatccaaggctttcaggctaagggagaggccgacatcctggctgctctgaaaaaactgcaggatcaacgtcaatatatagtcgccgagttcgagcagggacatcaatttctgcgcgaaagagaagagcatctgcttgagcagttggccaaactggagcaggaactaacagaaggacgcgagaagttcaaaagccgcggtgtaggagagctggccagactcgcactggttattagcgagctggaaggcaaggcacagcaatag

SEQ ID NO: 30521 - DNA, 768 bp, synthetic construct
  source 1..768: mol_type = other DNA; note = Synthetic coding sequence
atgagcagctctatgtggtacatcatgcagtcgatccaaagcaaatacagtcttagcgagcggctgattcgaacaatagccgcaatccggagctttccacacgacaacgttgaagatctgattaggggtggggcagacgtcaactgtacccacggaactcttaagccgcttcattgcgcatgcatggtgagtgacgccgattgcgtcgaactcctcctcgagaagggtgcagaagtgaatgcactggatggctataatcggaccgcgctccattacgccgctgagaaggacgaggcctgcgtggaagtgctgctcgaatatggcgctaatcctaacgctctggactacaataatgacacacctctgtcttgggccgcaatgaaagggaatctggaatcagtgtccatcttgcttgattacggggctgaagtgagagttatcaatctcatcgggcagacgcctattagcagactggttgccctactggtccgcggtctaggcacggaaaaagaagatagttgcttcgaactcctgcaccgagcggtggggcatttcgaactgaggaagaatggaaccatgcccagagaggtggctcgcgaccctcagctgtgtgaaaaattaacagtgctgtgcagcgcgccagggacactgaagacattagctagatatgctgtaagacggtctctcgggttgcagtacttacctgatgctgtcaaagggctacctctgcctgctagcctaaaagagtatctgttgctactggagtag

SEQ ID NO: 30522 - DNA, 585 bp, synthetic construct
  source 1..585: mol_type = other DNA; note = Synthetic coding sequence
gaacccgttcaacctcactggttctattgtaaagaggtcgaatataaacagctatggatgccattttccgtattcgattccctcaacctagaagaaatatacaactctgtgcagccggatcccgaatcggtcgtgctcggtaccgacggagggaggtacgatgtatatttatacgacaggatcaggaaggccgcttactgggaggaggaacccgctgaggtccgcagatgtacctggttttataaaggcgatacagactctcgatttattccttacactgaggagttcagcgaaaagcttgaggttatcgtgcagttccaaccgtctagtgtaccagacgaatgggggaccacacaggatggccagacccgccctagggtggtgaagcgcggaatcgacgataacctggacgaaataccggacggagagatgccgcaggtcgaccatttagtgtttgtggttcatgggattgggcctgtctgtgatcttagatttcgtagcataatagagtgtgtggatgatttcagagtagtgtctcttaagctcctcaggactcattttaaaaagtcactggacgatggctag

SEQ ID NO: 30523 - DNA, 981 bp, synthetic construct
  source 1..981: mol_type = other DNA; note = Synthetic coding sequence
atgccgcacctaccattggcctcttttagacctccattttggggcctgaggcactcaagaggcctgccacggtttcatagcgtcagtacccagagtgagcctcatgggtctcctattagccggcgtaatagggaagccaagcagaagcggctgagagaaaagcaggccacgctcgaagcagaaatcgcaggcgagagtaagtcaccagccgaaagcataaaagcctggcgcccaaaagagttagtcttgtatgaaatccctactaagcccggtgaaaagaaggacgtgagcggacctctgcccccagcttacagtccaaggtatgtcgaagccgcatggtacccctggtgggtgagagagggctttttcaaaccagaataccaagctcggctaccacaggctacaggcgagacattttcaatgtgtattccaccccctaatgtgacagggtcactgcacatcgggcacgcactgacagttgccattcaggatgctttagttcgctggcacaggatgagaggagaccaggtcctctgggtgccaggatctgaccatgcgggaatagccacgcaagccgtcgtggagaaacagctgtggaaggaaagaggcgtgcgcaggcacgagctgagtcgtgaagcattcctgcgcgaggtgtggcagtggaaagaggctaaaggcggagagatctgtgaacagctgagggcccttggagccagtctagactgggatagggagtgttttactatggatgtgggatcaagtgtggccgtcaccgaagcctttgtgaggctttacaaggcaggactcttatatagaaatcaccagctggtaaattggtcttgtgcccttagaagtgccatttccgacatcgaggtcgaaaacaggccgttacccggacatacacagttaagactaccaggatgtcctacccctgtgtcattcggactccttttctcggttgcattccctgtggatgggtag

SEQ ID NO: 30524 - DNA, 990 bp, synthetic construct
  source 1..990: mol_type = other DNA; note = Synthetic coding sequence
atggcaggcgctctggagggagatatctttattgggccaaaagccgaagaacaccgtggcctgctgagtatacgttacccgatggagcacggcatcgtcaaagactggaatgacatggaaaggatctggcagtacgtgtattctaaagaccagctgcagacattttcagaagagcatcctgtgctcctaacggaggcgccactcaaccctcgaaagaatagggagcgcgctgcagaagtgttcttcgagaccttcaatgtacccgctctcttcatctccatgcaagccgtgctgagcctgtacgctactggacgcactaccggcgtagtgcttgatagcggagacggggtgacacacgctgttcctatttatgaaggcttcgcaatgccacactccatcatgcgcatagacatcgccggaagagacgtgtccagatttcttagactctacttgcggaaggagggctatgattttcatagctcctctgaatttgagatcgtaaaagccatcaaggagagagcatgctacttgagtattaacccgcagaaggatgaaaccctcgaaacagagaaggctcagtactatttaccggatggaagcactattgaaatcgggcctagccgttttcgggctcccgagctcctattccgcccagatttaatcggcgaagagtcagaaggcatccacgaagttctggtgtttgcaatccagaaatcagacatggacctgcgcaggacactgttctccaatattgtcttatctggcggaagcaccctgttcaaaggcttcggcgacaggttattaagtgaggtcaaaaagttggcccctaaagacgtgaagatcaggatttccgctcctcaagaacggctctacagcacctggattggaggttcaatcctggcgtcattggacacgttcaagaagatgtgggtttctaagaaagaatatgaggaggatggagcaaggtccatccaccgtaagaccttctag

SEQ ID NO: 30525 - DNA, 450 bp, synthetic construct
  source 1..450: mol_type = other DNA; note = Synthetic coding sequence
atggaaaagaccgagcttatccaaaaggccaagttagctgagcaggctgaaagatacgatgatatggccacatgtatgaaggccgttacagagcagggggctgaactaagcaacgaagaaaggaacctcctgtcggttgcttataaaaacgtggtgggcggtaggcgttccgcatggcgtgttatctcatccatcgagcaaaagacggacacttctgacaagaagctgcagctgatcaaagattacagagagaaggttgaatccgaactaaggtcaatctgtactacggttcttgagctgctcgataaatatctgatcgccaacgccaccaaccccgagtccaaagttttctatcttaagatgaaaggagattacttcagatatctcgccgaggtggcctgcggagatgatcgtaagcagacaatcgacaacagccagggagcttattag

SEQ ID NO: 30526 - DNA, 735 bp, synthetic construct
  source 1..735: mol_type = other DNA; note = Synthetic coding sequence
atgctgagcgatcggaagagagagcttgaacatcgcttgtctgcgaccttggaggaaaacgatctgctgcaagggacagtggaggagctgcaggaccgcgttctaatcctagagcgtcaggggcacgacaaggacctgcaactccatcagagccagctcgagttacaggaagtgaggcttagctgccgccagcttcaggtgaaagttgaagagctgacagaagagagatccctccagtcgtctgccgcaactagcacttcactgttatccgaaatcgaacagtctatggaggcagaggagctggaacaagagcgagagcaggttactctgctgagtgtggagatgacagctctgaaggaggagagagataggttgagggtgacgtctgaggacaaggagccgaaagagcagttgcagaaggcaattcgggatcgggacgaggccattgccaaaaagaacgccgtcgagctcgagctcgccaaatgcaggatggatatgatgagccttaactcgcagcttctggacgcaattcaacagaaattgaacttatcacagcaattggaggcctggcaggacgatatgcacagagttattgacaggcagctgatggacacgcatcttaaggaaagatcacagcccgcagcagccctttgccgcggacacagcgcaggaaggggcgacgaacctagcattgcggagggcaagcgtctatttagcttcttcagaaagatttag

SEQ ID NO: 30527 - DNA, 603 bp, synthetic construct
  source 1..603: mol_type = other DNA; note = Synthetic coding sequence
tagcatatgctgtcaaaggtaggcatgtgggatttcgatatttttctgtttgacaggctgactaacggaaattctctcgtgacactcttatgccacctctttaatacccatggcttaattcatcatttcaagctagatatggtcaccctgcaccgtttcttggtcatggttcaggaagactatcactcccagaatccctaccacaacgctgttcacgccgcagacgtcactcaggctatgcactgttatctgaaggagccaaaactcgcatcgtttctaaccccccttgatatcatgctgggcctactggcagcagctgcacatgatgtcgaccatcctggagtgaatcagccttttctgatcaaaacaaatcatcatctcgcaaatctgtatcaggttcgtgagccaaatctcgaacctgctactgtttggagcatcgccttggggccagtccttaaaccagaaagctgtccctggcggaaaccctgcttccgcgttcttgaggttcagcgcagaatgaaacacaatttgtgtccccaaaagttcgtgcagacgcaaatgttaaaaatgagtaagatacaggccaacctcataccggtctag

SEQ ID NO: 30528 - DNA, 1728 bp, synthetic construct
  source 1..1728: mol_type = other DNA; note = Synthetic coding sequence
atggccatggctccttcccctagcctggttcaagtatatacctctcctgccgcagtggctgtgtgggaatggcaggatggactgggcacctggcacccatatagtgccaccgtgtgtagttttattgagcagcagttcgtgcaacaaaagggccagagattcgggctcgggagcctagcacacagtatccccctggggcaggcggatccttcgttagccccatacataatcgatctaccttcatggacacagttcaggcaggataccggcaccatgcgtgctgtgcggagacatctctttccacagcactcagcacccggaagaggagtcgtttgggagtggctgagcgacgatggatcctggacagcctatgaggccagcgtgtgcgattaccttgagcagcaggtcgctaggggcaatcaactggtggatctggctccgctgggatacaattacactgtgaattatacaacgcacacccagactaacaaaaccagcagcttctgccggtccgtcagacgccaggccggtcccccttatcccgtgacaactatcatcgcccctccaggccatacaggagtggcgtgcagctgtcatcagtgcctctccggctcacggaccggacccgtttccggcagataccgccactctatgactaacctgcccgcttaccctgtccctcaacacccaccacaccgcacagcctcagtgttcggcactcaccaggcgtttgctccttacaacaaacccagcctgtcgggggcacgttccgccccaaggttgaatacaaccaatgcctggggagcggctcctccgtctctgggcagtcaaccactctaccgaagctcactgagccatctgggtccacagcatctccctcccggttcttctacaagcggcgctgtctctgcttccttgcccagtggcccatcttcttctcccggatccgtgcctgccactgttccaatgcagatgccaaagccctcccgcgtccagcaagcgctagctggagccactcctaaacccgaacctgaaccagagcaggtcataaaaaattataccgaggaacttaaggtgcctcccgatgaagactgtattatctgtatggaaaaactgagtaccgcaagtggttactctgacgtaaccgattcaaaggccattggatccctagctgtcggtcacctcacaaaatgctcccacgcattccatcttctgtgtcttcttgctatgtactgtaatgggaataaggacggttctttgcagtgtccttcttgcaagaccatatatggggagaaaacaggcacccaaccccagggcaaaatggaggtgttgaggtttcagatgagtctgccgggtcatgaggattgcggtaccatactcatcgtctattcaatacctcacggcatacagggtccagagcatcctaatcctggcaaaccttttacagcaagggggtttcccaggcagtgctacctgcctgataatgcccagggtcgaaaggtgctggagcttctaaaggtggcctggaaaagacggctgatatttacagtgggtacctcaagtacaaccggtgaaacggacacagtggtgtggaacgagattcatcacaagactgagatggaccgtaacattacaggacatggttaccccgatcccaattacctccagaatgttcttgcagagctcgccgctcaaggagttaccgaagactgcctcgagcagcaatag

SEQ ID NO: 30529 - DNA, 3036 bp, synthetic construct
  source 1..3036: mol_type = other DNA; note = Synthetic coding sequence
atggtctcctcagatagaccagtgagcctcgaagatgaagtcagtcactcaatgaaggagatgatcggaggatgttgcgtgtgcagtgacgaacgaggctgggctgaaaacccactggtgtattgtgatgggcacggttgcagcgtggcagttcaccaagcttgttatgggatcgttcaggttcccactgggccttggttctgccggaagtgcgagtcacaggagagggcagcacgcgttcgctgcgagctttgtccgcacaaagacggagcactgaaacgcacagataacggcggatgggcgcacgtcgtctgtgccctgtatatccctgaggtgcagtttgcaaatgtgagcacaatggagcccatagttcttcaatcggtgccacatgaccgatataacaagacttgctatatctgcgacgagcaagggagagagtcaaaggccgctacaggtgcatgtatgacatgtaataagcatgggtgtcggcaggcctttcacgtaacttgcgcgcaattcgccggactgctgtgcgaggaggaaggcaacggagctgacaatgtacagtactgtggatactgtaagtatcactttagcaagctgaagaaaagcaagcgcggatctaataggtcatacgatcagagccttagcgactcctccagccactcccaggacaaacaccacgagaaggaaaaaaaaaaatataaggaaaaggataagcataagcagaaacacaaaaagcagcctgagccctctcccgctctggtgccatctctgaccgtaactaccgagaaaacatatacgtcaactagtaataactccatatcaggcagcctgaaaaggttagaagataccaccgcaaggttcactaatgccaactttcaggaggtatcagcacatacctcatctggtaaggatgtatcggagacaaggggttcagagggcaaaggaaagaagtcgtcagcacatagctcaggccagagaggtcggaaacctggtggaggacgcaatccaggtaccaccgttagcgctgcctcacctttccctcagggatccttctcagggacacccggatcagtaaagtcctcgagtggctctagcgtccagagcccacaggatttcctgagcttcacagacagcgacctcaggaatgacagttactcacattctcagcagtcatccgctacgaaagacgtgcataaaggcgagtccgggtctcaggaaggaggggtgaactctttttcaactctaatcgggctccctagtacttcagctgtaacaagccagccaaaaagctttgagaacagcccaggggacctggggaattcctcactgcctacagctggctacaagcgcgctcagactagcggaattgaagaagagacagtgaaggagaaaaaacggaaaggaaataagcagtcgaagcacggcccaggtcggccaaagggaaataagaatcaagagaatgtgtcacacctgtcagtctctagtgcatctcctacaagttcagtcgctagtgctgccggatctatcaccagtagtagcttacagaaatcacctactttgcttagaaacggcagtctgcagagtctgagcgtgggctcctcaccagttggctctgagattagcatgcagtaccgacatgacggagcctgccccaccactacattttccgaattgctgaatgccatccacaacggaatctataattctaatgatgtagccgtgtcctttcctaatgtagtgtccgggtccggctccagcacccccgtttcttctagtcatctcccccagcaatcttctggtcatctgcagcaggttggggcacttagtccctctgccgtttccagcgccgctcccgcagtggctacaacccaggctaacacactgagtggcagctcgctctctcaagctccaagtcacatgtacgggaacaggagtaacagctctatggctgcgctgatcgcgcagagcgagaacaatcagaccgaccaggatctgggcgataatagccggaatctcgttggcaggggctcttcacctcggggatcactttcccctcgctccccagtgtcatcgctgcagattcggtatgatcagcccggaaacagtagcctagagaaccttcctcccgtcgcagcttctatcgagcagctgctggaacgacagtggtctgagggccagcaattccttttagagcagggcaccccgtccgacatcttggggatgttgaagagcctgcaccagcttcaggttgagaatcgcagactcgaagaacaaataaagaaccttacagctaagaaggaacgcctgcagcttctcaacgcacagctgtctgtaccttttcccacaattactgccaacccatcaccatcccatcagatccataccttttctgcccagacagccccaaccaccgatagcctcaactcatccaagagcccccatattggcaactctttcctgcccgataattcacttccggtgctgaatcaggatctgactagttccggccagtctacctccagcagcagtgcactctctactcctccaccagccggtcagagtccagcccagcagggctctggggttagtggagtgcaacaggtgaatggcgtgacagtgggagccctggcctccgggatgcagcccgtaacttctacgattccggcagtctcagccgttggaggtatcataggcgctctgccgggtaaccagcttgcaattaacggcatcgttggtgccctgaacggcgtcatgcagacgcctgtgaccatgtctcagaatcctacccccctcacccataccactgttccccctaacgcgacgcacccaatgcctgccaccctcacaaattccgcctcgggcctgggtcttctgtcagaccagcagcgacagattctgatccatcagcagcagttccagcaactactgaactctcaacaactgacacccgtgcacagacacccacactttacccagctgccaccaacccacttctccccaagtatggagatcatgcaggtgcgcaagtag

SEQ ID NO: 30530 - DNA, 3786 bp, synthetic construct
  source 1..3786: mol_type = other DNA; note = Synthetic coding sequence
atggccgctgccgctgcctcaggtgcgggaggagctgcgggagccggaactggaggagccggaccggctggacgcctcctaccccctcctgcccctggttcacccgcagcacctgctgcagtgagtcctgcggcagggcaaccaaggcctcccgcacccgcttctagaggtccaatgcccgctaggattgggtactatgagattgatcgcaccataggaaaagggaactttgccgtggtaaagcgcgctacgcacctggtaaccaaagcgaaggtcgcgataaagatcattgataagactcagctcgatgaggagaatctaaagaagatattcagagaggtccagatcatgaaaatgctttgtcaccctcacataatccggttgtaccaagtcatggagacagagcgaatgatctacctcgtgactgaatatgcatctggcggagagatattcgatcatctggtagctcacgggagaatggccgagaaggaggcaagacggaagttcaagcagattgtaacggctgtgtacttttgtcactgtaggaatattgtgcatcgggatctgaaggcagaaaacctgcttctggatgccaacctcaacatcaagatagctgattttgggttttccaacctgttcactcccggacagttgctgaaaacctggtgcggctcacccccatacgcggcaccagagctcttcgagggaaaagaatacgacggacccaaagtggacatctggtccctcggggtggtcctgtacgtacttgtgtgcggggctttgcccttcgacgggtccaccctgcagaacctacgtgcaagggtactgtccggcaaattcagaattcctttttttatgtcaactgagtgtgaacatctgattcgacatatgttagtgttagacccaaataagcgattatctatggagcaaatatgcaaacacaagtggatgaaactgggtgatgccgatcctaactttgatcgccttatcgcggagtgtcagcagctcaaggaggagcgccaagtcgatccacttaacgaagacgtgttgctggcgatggaggacatgggcctggacaaggaacagactttgcaagctgaacaggccggaacagcaatgaatatcagtgttccacaggttcagctgattaacccagagaaccaaatcgtcgaacctgatggaacactgaatctcgatagcgacgagggagaagagccaagccccgaggccctggtccggtatctgagtatgcggagacacacggtgggagtagccgacccaaggacggaggtgatggaggacctgcagaagctgctcccaggtttcccaggggtgaacccccaggctccctttttgcaagtggcccctaatgtgaatttcatgcataatcttcttcctatgcagaatctacagccaacaggacagctggagtataaggaacagagcctgctccaaccacctactttacagctgttgaatgggatggggcctctcggaagaagggcttccgacggcggagcgaacatccagttgcacgctcagcagctgcttaagcggcctaggggcccttcccccctggttaccatgacaccggctgttcctgccgtcacaccggtcgatgaggagtccagcgacggcgagccagatcaagaagccgtccaaagatacctcgctaatcgcagcaagcgccataccctcgcaatgacgaacccaactgcagagattcccccagatctgcagagacaacttgggcagcagcctttcaggagtagggtgtggcctcctcatctagtgcccgaccagcacaggtccacctataaggatagtaataccctgcatttacctaccgaaagattcagtcccgtgcgcaggtttagcgatggtgctgctagtatccaggcctttaaagcacacttagagaagatggggaataacagctcaataaagcagctacagcaagagtgcgagcagctgcaaaagatgtacggcggacagatcgacgaaaggactctagagaaaacacagcaacagcatatgctgtatcaacaggagcagcaccatcaaattctgcagcagcaaattcaagatagtatctgcccgccacagccctcccctccattacaggcagcatgcgagaatcagcccgctctgcttacccaccaactgcaacgactaagaattcaaccctccagtccaccacccaaccacccaaataatcatttgttccgtcagccctctaattctccgcctcctatgtcatcagctatgatccaaccacacggcgcagcctcaagctcacaattccagggacttcccagtcgatccgccattttccaacagcagcccgagaactgcagcagcccccctaatgtagcattaacctgtctggggatgcagcagcccgctcagtctcagcaggtgacaatccaggtgcaagaacctgtggatatgcttagtaacatgccgggtaccgccgctgggtcctccggcagaggtattagcatctccccatctgccggacagatgcagatgcagcacaggacaaatttgatggctactctgtcgtacggacaccggcctctttccaagcaactgagtgccgattcagccgaggcacattccgcccaccaacagcccccacactatacaacgtcagccctgcaacaagcactgcttagccccacaccacctgattacaccagacatcaacaggtcccgcacatattgcaaggactgctgagcccgagacacagcctgacaggccattctgatattagattgccaccgactgaatttgcccagttaattaaaaggcagcagcagcagcgacagcagcagcagcagcagcagcagcagcaagaatatcaagagttattccggcacatgaatcaaggcgatgctggttccctcgccccttcactgggcggtcagtccatgacggaaaggcaggccctttcctatcagaatgcagattcctaccaccaccacacctcccctcaacatctgctgcagattcgcgcacaggaatgtgtaagccaagccagttcccccactccccctcatggttatgcccaccagcccgctctgatgcacagcgagtcgatggaggaggactgtagttgtgagggagctaaagacggcttccaggatagcaaaagttcatccacactgactaaaggctgccacgattcccctctgttgctctcaactgggggacctggggatccagaatccttactcggaacagttagccatgcgcaggaactggggattcatccatacgggcaccagccaactgcggcttttagtaaaaacaaggtcccaagcagagaacccgttattgggaactgcatggataggtcaagccccggacaggcagtggagctgcctgaccacaacgggcttggatatccagcacgccctagcgttcacgagcatcacagaccacgcgctctgcagcggcaccataccatccagaactcagatgacgcttatgtacagttagacaatctccctgggatgtcccttgtcgccggaaaggccctgtcttccgccaggatgagcgacgcagtgttatcccaaagcagcttaatgggtagccaacaatttcaggatggcgagaatgaagaatgtggcgcttccctcgggggtcacgaacatccagatctgtcggacgggagtcagcacctaaactcatcatgttatcccagcacgtgcatcaccgatatcctcctgagctacaagcatcccgaggtctcctttagcatggagcaagcgggagtctag

SEQ ID NO: 30531 - DNA, 519 bp, synthetic construct
  source 1..519: mol_type = other DNA; note = Synthetic coding sequence
atgagctccaacgagtgctttaagtgtggtcggagtggtcactgggctagagagtgccctaccggaggaggtaggggacgtgggatgaggtcaagagggagaggatttcaattcgtttcttcctcattgcccgacatctgttacagatgcggagaatcaggtcacctggctaaagattgcgacctacaggaggacgtggaggcgtgctataattgcggacgaggaggacacatagcaaaagattgcaaggagccgaaaagagagagggaacaatgctgttacaactgtggcaagccaggacatctggcccgagactgcgatcatgcagacgagcaaaagtgctacagctgcggcgagttcggtcacatccagaaagattgtacaaaagttaaatgttaccgatgtggcgaaaccgggcatgtggctattaactgctcaaaaaccagcgaagtgaattgctatagatgcggagaatcaggccatctggccagagaatgtacaatcgaagccaccgcttag

SEQ ID NO: 30532 - DNA, 471 bp, synthetic construct
  source 1..471: mol_type = other DNA; note = Synthetic coding sequence
atgctagcggagaaactccccaacctcactcatcttaacctgtcggggaataagctgaaagatatctccactctagaacccctcaagaagttggagtgccttaagtctctggatctgtttaactgcgaggtcaccaatctaaatgactacagagaaagcgtgtttaagttgttgccccagcttacatacttggacggatacgatagagaagatcaggaggctcccgatagcgacgcagaggtcgacggagtggacgaggaggaggaagacgaagagggggaggacgaggaagacgaggatgacgaggatggagaggaagaggaattcgatgaggaggacgacgaagacgaagacgtcgagggcgatgaagacgacgacgaggtcagcgaagaagaggaagaattcggactggatgaagaggacgaggacgaggatgaggacgaggaggaagaagagggaggtaagggttag

SEQ ID NO: 30533 - DNA, 516 bp, synthetic construct
  source 1..516: mol_type = other DNA; note = Synthetic coding sequence
atgagcagtggcaatgctaagataggacatcccgctcctaatttcaaggcaacggccgtgatgcctgacggacagttcaaggacatcagtctgtctgattataaaggaaagtacgtggtctttttcttttacccactcgatttcactttcgtgtgtcccaccgagattattgcctttagtgacagagccgaggagttcaaaaaattaaattgccaagtgatcggggcaagcgtggacagccatttttgccatctggcatgggtgaacacgcccaagaaacagggtggactaggaccaatgaatatcccgctggtgagtgatccgaagagaacaatcgcccaggattacggagtgttgaaggccgacgaaggcatctcctttcgcggacttttcatcatagatgacaaggggatccttaggcagatcactgtcaacgacctccctgtaggcagaagcgtcgatgagacactacgactggtgcaggccttccaatttacggataaacatggggaatag

SEQ ID NO: 30534 - DNA, 111 bp, synthetic construct
  source 1..111: mol_type = other DNA; note = Synthetic coding sequence
atgatcgagaagatgcaaggaagccggatggatgagcagcggtgcagttttcccccaccattgaaaaccgaggaagattacatcccctacccttcagttcacgaggtgtag

SEQ ID NO: 30535 - DNA, 639 bp, synthetic construct
  source 1..639: mol_type = other DNA; note = Synthetic coding sequence
atgtcatccaagggatcctccaccgacggcaggactgacctcgctaatggctcccttagcagcagccccgaggagatgagcggcgctgaagaaggccgagaaacctcaagcgggatagaggtggaggccagcgacctgtcgctgtccctcaccggcgatgacggcggaccaaacaggacttctacggagtccagaggcactgataccgaatcgtccggtgaagataaagatagcgactctatggaagatactggtcattattcgattaacgacgaaaatcgtgtgcatgaccgcagcgaagaagaagaagaagaagaggaggaggaagaggaggaacagcctcgcagaagagttcagagaaaaagggccaatcgggatcaggattcttccgatgatgaacgtgctctagaggattgggtctcttctgagacatccgcattgccccgtccacgatggcaggccttgcccgctttacgagaacgggagttagggtctagcgctcggtttgtctatgaagcgtgtggcgcaagggtattcgtgcagcgattccggctgcagcatgggctcgaaggacataccggatgtgtaaacaccctccactttaatcaacgtggcacatggctagcctcaggaagctag

SEQ ID NO: 30536 - DNA, 726 bp, synthetic construct
  source 1..726: mol_type = other DNA; note = Synthetic coding sequence
atgacctccgtgacccgcagcgagattattgacgaaaaagggccagtgatgagcaagacccatgatcatcaactggagtcctcgctctccccggtcgaggtgttcgcaaaaacgtctgctagtctggagatgaatcagggtgtcagtgaagaacgcatccacctgggttcctcgcccaaaaagggcggaaattgcgacctctctcaccaggaaagactgcaaagcaaatcgttacacctgagcccgcaagaacaaagcgcttcttatcaagacaggcgccagtcctggagaagggcatcaatgaaggagacgaaccggaggaaatccctccatccgattcaccagggtattactgaactgtctcgttcgataagcgtggatctcgctgagagtaaacggcttgggtgcctgctgctgagttccttccagtttagtattcaaaagctggaacccttccttagggacacaaagggcttttcccttgagagctttagagcgaaggctagctctctgtcagaggagcttaaacatttcgctgacgggctggaaactgacgggaccctccaaaaatgcttcgaggactctaacggtaaggctagcgatttttccctcgaggcctcagtcgcagaaatgaaagagtacataaccaagttttcactggagaggcagacctgggaccaattgctgctgcactaccagcaggaggctaaggagattctgtcctag

SEQ ID NO: 30537 - DNA, 1188 bp, synthetic construct
  source 1..1188: mol_type = other DNA; note = Synthetic coding sequence
atggctagcgctgcttccgtgactagcctggccgacgaagtgaattgtccgatctgccaaggtacattgcgcgaacccgtgactatcgattgcggccacaatttctgtcgtgcctgcctgacgcgctactgtgaaattccagggccagatctcgaagaatcccccacatgcccgctctgtaaggagcccttcagaccgggaagtttccgcccaaactggcagctggctaacgtcgttgagaacatcgagaggctacagcttgtcagcacgctggggctgggggaggaggatgtctgtcaggagcatggagaaaaaatctattttttctgcgaagatgacgagatgcagctgtgtgtggtctgtcgcgaggccggagagcacgcaacccataccatgcggtttctggaagatgctgcagcaccatatcgcgagcagatccacaagtgcctgaagtgtctacggaaggagcgggaggagatacaggaaattcagtcccgagaaaacaagagaatgcaggttctactaacgcaggtgtccactaagagacagcaagtaatctctgagtttgcccacctgcggaaattccttgaagagcaacaaagtattctcctagctcagctggaatcccaggacggggatattctgcgacagcgcgacgagttcgacctgcttgtcgccggagagatctgccgcttctctgccctgatcgaagagctggaagaaaagaatgagcggcctgccagggagcttctgaccgatatccggtctactttgatcaggtgtgaaactcgcaagtgtagaaagcccgtggcagtgtctccggagcttggacagcggattagggactttcctcagcaagccctgcctttgcaacgggagatgaagatgtttctggagaaattgtgttttgaactcgactatgagcccgctcatatcagcctcgatcctcagacaagccaccctaagttactgttgtcagaagaccaccagcgtgctcagttttcttacaaatggcaaaattccccagacaatccacaaaggttcgacagggcaacttgtgtgctcgcccacaccggaatcactgggggaagacatacttgggtatggatggccagagttccaggcgacagtggatgctgccagttttgcagcccacccagtgtgctcggaacagaagtggcggcatag

SEQ ID NO: 30538 - DNA, 1887 bp, synthetic construct
  source 1..1887: mol_type = other DNA; note = Synthetic coding sequence
atgtccgataagtccgatctgaaagccgaactggaaagaaaaaaacagcggctggcacagatccgtgaggagaagaagcgcaaggaggaagagaggaagaaaaaggaagcggatatgcagcaaaagaaggaacccgtgcaggacgatagcgacttagatcgtaagcggagagagacagaagctttgctgcagagtattggaatttcacccgaaccccctctcgtgcccacccctatgagcccaagcagcaaaagtgtctccacaccttccgaggccggttcacaggattccggggatctgggtcctttgactcgcactctacagtgggacacggacccctccgttcttcaactccagtccgatagtgagttaggaagaaggctccacaaattgggagttagtaaggtcacccaggtggattttctgccaagggaagtggtgtcctacagtaaagaaacgcagacccccctcgcgacacaccagagcgaagaagacgaagaagatgaagagatggtcgaatccaaagtgggccaagatagtgagttggagaaccaggacaagaaacaggaggttaaagaggccccacccagagagttgactgaggaagagaaacagcagattctgcactcggaggaattcctcatattctttgatcgcactatacgggtcatagagcgcgcactggcagaggattctgacatattttttgattactccgggcgagaactagaggagaaggatggagacgtgcaagcaggcgctaatctgtcgttcaataggcagttttatgacgagcattggagcaagcaccgcgtggtgacttgtatggactggagcctgcaatatcctgaactcatggtggcctcttataacaacaatgaagacgccccacacgaacctgacggtgtggcactcgtgtggaatatgaagttcaaaaagacgacacccgaatacgtcttccactgtcaatcttcggtcatgtctgtgtgcttcgctcgattccacccaaatcttgtcgtcggagggacctactctggccaaattgtgctgtgggacaaccggagccaccgacgcaccccagtgcagcggacaccgctctcagccgctgctcatacgcaccctgtctactgtgtaaacgtcgtcgggacacaaaacgctcacaatttgattaccgtgagcactgatggcaagatgtgttcctggagcctcgacatgttgtctaccccacaggaaagtatggaactggtttacaacaaaagcaagccagttgccgttacaggaatggcctttcccaccggggacgtgaataactttgtggtcggttctgaagaggggactgtctacactgcctgcagacatggatctaaagcgggtatcggggaggtgttcgagggacaccaaggacctgtaactgggatcaactgccacatggccgtggggcctatcgacttctctcatttgttcgtcacttcctctttcgactggacagtgaagctctggaccactaagcacaacaaaccgctttatagctttgaagacaacgcagattacgtgtatgacgtgatgtggagcccagtccaccctgccctattcgcctgcgtggatggaatgggacgcctcgacctgtggaatctaaataatgacactgaggtcccaaccgcaagtgtggccatagagggagcaagcgccctcaatcgagtgagatgggcccaggccggtaaagaggtagcagtgggagactctgaaggacggatttgggtgtacgacgtgggagagctggcagtcccacacaacgacgagtggaccagatttgcaaggacactcgtggaaatcagggccaatcgcgcagatagcgaagaggagggcacagtggagctgtccgcctag

SEQ ID NO: 30539 - DNA, 1644 bp, synthetic construct
  source 1..1644: mol_type = other DNA; note = Synthetic coding sequence
atggccggtacaaaaaacaagactcgcgcacaagctaagacagagaagaaggccgcaatccaggctaaggccggagccgagcgcgaggccacaggcgttgtcagacccgtggcaaaaacaagggccaaggccaaggcgaagacgggctccaagaccgatgctgtggccgaaatgaaggcagtgtcaaagaataaagtggtagccgaaaccaaggagggggctctctccgagccaaaaacactagggaaggcaatgggagactttacccctaaggcgggaaacgaaagtacctcatctacgtgtaagaatgaggctggcactgacgcgtggttttgggcaggcgaagaagccacaatcaactcatggttttggaacggagaggaagcaggtaattctttctcaacgaagaacgataaacccgaaataggtgcccaggtgtgtgccgaagagttggagccggcagccggtgccgattgcaaacctaggtcaggtgcggaggaggaggaggaagaaaacgtgatcggaaattggttttgggagggagacgataccagttttgaccctaatccaaaaccagtcagtcgaatcgttaaacctcaaccggtttacgagattaacgaaaaaaaccgacctaaggactggtcagaggtgacaatttggccaaatgccccagccgtcactcctgccgtgctaggcttccgctcccaggccccaagtgaagcgagcccccctagctacatagtactggcaagcgctgaagagaatgcttgttctcttcccgtggccaccgcttgccggcctagccggaatacgcgctcttgctcccagccaattccagagtgtcggttcgattcagacccgtgcatccaaactatcgacgagattcgaaggcaaatcagaatccgcgaagtcaatggcataaaaccgtttgcatgtccctgcaagatggagtgctatatggactctgaggaattcgagaagctcgtctctttactgaagtcaacgaccgatcccctgatccacaaaatagccagaattgccatgggagtgcataatgttcacccattcgcacaggagttcatcaatgaggttggggtagtgaccctgatcgagtccctgttgtctttccccagccctgaaatgcgcaaaaagacagtgataacgctgaatccaccctcgggcgatgaaagacagagaaagatcgagctgcacgtcaagcacatgtgtaaagagactatgagctttccactgaacagccccggacaacagtccggcctgaagattctgggacagctcaccactgatttcgtgcaccattatatagttgccaactactttagcgaactgtttcatctgcttagttcaggcaattgtaaaacacgcaatctggttctcaaactgctgctcaacatgtctgaaaatccaactgcagccagagacatgataaatatgaaagcgctcgctgccctgaaattaatctttaaccagaaggaagccaaggctaatctcgtgtctggggtggctatttttatcaatattaaggaacatatccggaaagggtcaatcgtcgtcgtggaccatttaagctacaacaccttgatggcaatctttagagaggtcaaagaaatcattgagaccatgtag

SEQ ID NO: 30540 - DNA, 747 bp, synthetic construct
  source 1..747: mol_type = other DNA; note = Synthetic coding sequence
atggccttttcaggcagagctcggccatgcataattcctgagaacgaggagatccctcgggcagccttgaacacagtccatgaggctaatgggactgaggatgaaagagctgtgagtaaactccaaagaagacatagtgacgtgaaagtctacaaggaattctgcgatttctacgccaaattcaacatggccaatgccttagcgtcagccacttgcgagcggtgtaagggaggctttgcacccgctgaaacaatcgttaacagtaacggagaactgtatcatgagcagtgctttgtttgtgcacagtgcttccagcaattccctgaagggctcttctacgagtttgagggaagaaaatattgcgaacacgattttcagatgctctttgcgccatgctgccaccagtgtggggagttcatcattggacgcgtgataaaggccatgaacaattcatggcatcccgaatgcttcaggtgcgacctctgtcaagaagtgctggccgacataggatttgtgaaaaacgcgggacgacacctctgtagaccttgtcataaccgggaaaaggcgcgtgggttgggcaaatacatctgccagaagtgtcacgcgattatcgacgaacaaccactcattttcaaaaatgacccctatcatccggatcactttaactgtgcgaactgtggtcaggaaggttccgactgtcgatgtacaggcgctgagcgcggtgctatcctccctgccatgccgtag

SEQ ID NO: 30541 - DNA, 621 bp, synthetic construct
  source 1..621: mol_type = other DNA; note = Synthetic coding sequence
atggagtctaacttcaatcaggagggtgtgccacgtccttcctatgtcttcagcgcagatccaattgccagaccaagcgagataaactttgacggcattaaactggatttatctcacgaattctcattagtggcgccaaatacggaagctaattcatttgagagtaaagactacttacaagtatgtctccgcatacggccattcacccagagtgagaaagaactcgaatccgagggatgcgttcacatcctggactcccagactgtggtgctgaaggagccacagtgcattttgggacggctgtcggagaaaagcagtgggcagatggcccagaagttttcattcagtaaagtttttggacctgccaccactcagaaagagtttttccagggctgcatcatgcagccagtaaaggacctgctcaaagggcaatcaaggcttatattcacctacgggctcaccaatagcgggaaaacctacacgttccaggggacagaagaaaacatcgggatattgcccaggacactgaatgttctctttgatagtctgcaggagaggctgtatactaaaatgaatcttaagccccacaggtcacgggagtacctacggctctcttcctag

SEQ ID NO: 30542 - DNA, 990 bp, synthetic construct
  source 1..990: mol_type = other DNA; note = Synthetic coding sequence
atggaagtggctgagcccagctctccaaccgaggaggaagaggaggaagaggagcactcagctgagccgaggcctcggactaggtcaaatccagaaggagctgaagatagggctgttggggcacaggcctccgtgggaagccggtcagaaggcgaaggggaagccgcttccgctgatgacggtagcctcaatacctccggcgcaggcccaaagagctggcaggttccaccaccagcacctgaggtgcagatccggacacccagggtcaattgccctgaaaaggtgatcatttgtcttgatttgtccgaagagatgtccctgccaaaactggaaagctttaatggcagcaagaccaacgctctcaatgtttctcaaaagatgattgagatgtttgttagaacaaaacataagattgataaaagtcatgaatttgctctcgtcgttgtcaacgatgatacagcttggctcagtggcttgaccagcgatcctagggagctgtgttcatgtctgtacgatctagagacggcatcctgctcaacttttaacatttcaggggctagccctgctcgacaacagaagactgaattacccgtgactgaaaatgtgcagactattccccctccctacgtggtgcgcacaattctggtgtatagccggcctccctgtcagccccagttttcactaacagaaccgatgaagaaaatgtttcagtgcccctatttcttctttgacgtcgtgtacatccataatgggactgaggaaaaggaagaggaaatgtcatggaaagatatgtttgccttcatgggcagcttggacacgaaagggacatcatacaagtacgaggtggccctggcaggtccggcattggagttacataactgcatggcaaagcttttggctcaccccctgcagcgcccttgtcaaagtcacgccagctattccctgttggaagaagaggacgaggccatcgaggtggaagctacagtgtag

SEQ ID NO: 30543 - DNA, 1620 bp, synthetic construct
  source 1..1620: mol_type = other DNA; note = Synthetic coding sequence
atggcaacttccgcacctctgagaagcctggaggaagaggtgacctgttccatttgtttagactacctccgcgacccagtaaccatcgattgcggccacgttttctgcaggtcgtgtactaccgatgtccgacccatatcgggatcacgccctgtctgtcctctgtgtaaaaagccttttaagaaggaaaacatcaggcctgtatggcagctcgcgagtctggtggaaaacatcgaaagactgaaggtcgacaaaggtcgacagccaggagaagttactcgggagcagcaagatgcaaagctgtgcgaacggcaccgggagaagctacactattattgtgaggatgacggcaaactactgtgtgtgatgtgccgcgagagccgtgagcaccggccacatacagccgtcttgatggagaaggccgctcagccccaccgtgagaaaattctgaaccatctatcaactttacggcgtgatcgggacaagattcaagggtttcaggcaaaaggagaggccgatatcctcgcagccctgaaaaagctgcaagatcagcgccaatatatcgtcgctgagtttgagcagggccaccagtttctgcgggagcgcgaagaacatctgctggagcagctggccaagctggagcaagagctgactgagggaagggaaaagttcaagagccgtggcgtcggcgaactcgctcggctcgccctagttatctctgagctggagggcaaggcccagcaacccgctgcagagctgatgcaggacactagagactttttgaacagatacccccgaaaaaagttctgggtcggcaaaccgatcgctcgggtagtcaaaaagaagacaggggagttctcagataagcttcttagcctccaaagaggcctgagggaatttcaagggaagctgttacgcgatttggaatacaagaccgtttccgtgaccctcgatccccagtcggcatccggctacctgcaactgtcagaggattggaagtgcgttacctatacatctttgtataaaagcgcctatctgcatccccaacagtttgactgtgagcccggagtcctagggtcaaagggcttcacctgggggaaagtgtattgggaagttgaagttgaaagagagggttggtccgaggatgaggaagagggggacgaagaggaagagggagaggaagaagaggaggaagaagaggcgggttacggtgacgggtatgatgattgggagacagacgaagatgaggaatctctgggcgatgaggaggaagaagaagaggaggaagaagaagaagtgctggagagttgcatggtgggggtagcaagggacagcgtcaagcgcaagggtgatctgtcactgagacccgaggacggtgtttgggcccttaggctaagctcaagtggaatttgggccaacaccagccccgaggctgaacttttccccgctctacgccctaggagggtggggattgccctggactatgaagggggtaccgtcacttttacgaatgcagagtcccaggagctcatatatacttttaccgcgaccttcactcggcgactagtgcccttcctctggctcaagtggccgggaacccgactgctgcttcggccttag

SEQ ID NO: 30544 - DNA, 3558 bp, synthetic construct
  source 1..3558: mol_type = other DNA; note = Synthetic coding sequence
atgtgtgaagtgatgcctacaatcaatgaaggagataggctcggtccgccacatggagcggacgcggatgctaattttgagcagcttatggtgaacatgctagatgagagggaaaagctgttggagtcccttagagagtcccaggaaacactcgccgctactcaaagtaggcttcaggacgccatccatgagagggatcaattgcaaagacacttaaattccgcactgcctcaagagttcgctaccctcacccgagagttgagcatgtgccgagagcaactgctcgagagggaggaggaaatttcggaactcaaggcagaacgcaataacaccaggctgttactggaacatctggagtgcctggtttccaggcacgagaggagtcttcgaatgacagtggtgaagaggcaggctcaatcacctagcggagtctcctcggaagtagaggtcctgaaagcattgaaaagtttgttcgagcaccacaaggctctcgatgagaaggtacgcgagcgactgcgtgccgctttagaacgagtgactaccctcgaagagcaactggccggtgctcaccaacaggtcagcgctctgcagcagggcgctggggtgcgggatggagcagctgaggaggaaggtaccgtggagctcgggccaaaaagattatggaaagaggacactggacgggtggaagagctacaggaattgctggagaaacagaacttcgagctgtcccaagcaagggagcgtctcgttaccctgacaaccaccgtgactgagctagaggaggaccttggtactgctcggagggacttgatcaagtcagaggagttgagcagtaagcatcagcgtgatctccgggaggcacttgcccaaaaggaggatatggaagaacgaatcaccacacttgagaagcggtacctggccgcacaacgggaagcaacctccattcacgatttgaacgacaaattggagaacgagttagccaataaagaaagcttgcacaggcaatgcgaggagaaagccagacatctccaggagctgctggaagttgcagagcagaaactacagcagaccatgagaaaagccgagactttacctgaggttgaagctgaacttgcacagagaatagctgccctcaccaaagctgaagaacgtcacggcaacatcgaggagcacctgaggcagctggaaggacaactggaagaaaaaaaccaggagcttgctcggaccgccgtgcaagtaaggcaacgggagaagatgaacgaagaccacaacaaacggctgtctgatacagttgaccggcttctgtccgagtcaaacgagaggctgcagcttcacttaaaggagagaatggccgctctggaagagaaaaacaccctgatccaggagctcgagtcatcacagaggcagattgaggagcagcaccaccacaaggggcgactttcggaagagatagagaaactgaggcaagaggttgaccagcttaagggtcgagggggaccatttgtggatggtgtccatagtagaagtcacatgggatcggccgcagatgtcaggtttagccttgggacaacaacacacgctccccctggagtgcaccgacgctatagcgcccttagggaagagtcggcaaagctggccttgcctctgacagtgacactgaggtctcctacttggatgcggatgagccaaggtgtctgttgcaatttagaatatcacagttcaggaaccttgtgcggctccagtgggcctctgcctgtccccgaaatgattcaagaggagaaagagtcaaccgagctgagagccgaagaaatcgagactagagtgacctccggcagcatggaagccctgaacctgaaacaattgcggaagcggggatcaatccccacaagcctgaccgcgctttctcttgcatccgcctccccgcctcttagcggaaggtcaacccctaagttaacaagcagatcagccgctcaggatctggatcggatgggagtcatgacattgcctagtgacctccgcaagcatcggcgaaaactgctctcaccagtcagccgggaagagaaccgcgaggataaagcaactattaaatgcgaaacgagcccgccatcttcccccagaaccctgcggctggagaagctgggacatccagcactctcacaggaggaaggtaaatcagcactcgaggatcaaggaagtaatccctcatcctctaactcatctcaggatagccttcacaaaggggcaaaaagaaagggcattaagtcatcaatcggcagattattcggcaagaaggagaagggtaggctaatccaactgagtagggacggggctacagggcacgttcttcttacagattctgagttctccatgcaggagcctatggtaccagcgaagttgggcacacaggcggagaaggacaggcggctgaaaaagaagcaccagctcttagaggatgcaaggcgaaagggcatgccctttgctcagtgggacggacccactgttgtatcatggctcgaattgtgggtcggaatgcccgcatggtacgtagctgcatgtcgggcaaatgttaagagcggggctattatgtccgctctgtccgacacggagatccagcgggaaattgggattagcaatgctttgcataggcttaaactaagattggctatccaggagatggtctctctgaccagccccagtgcgcctcctacatctcgcacgtcgagtggaaacgtctgggttactcatgaggagatggagaccctagaaactagtaccaaaaccgactctgaggaggggagctgggcccagactcttgcgtatggcgacatgaaccacgagtggataggaaatgagtggcttccttctctgggattaccacaatataggagttacttcatggaatgcctcgttgacgctcgaatgctggaccacctgacaaaaaaagaccttagagttcacttgaagatggtggatagctttcatcgcacatccttgcagtatggcattatgtgcttgaagcggttgaattacgatagaaaggaactcgagaaaagaagagaagaatctcaacacgagattaaggatgtgctcgtttggacgaacgatcaggtcgtccactgggtgcagagcatcgggttgagagactacgccggaaatctccatgagtccggggttcatggtgctctcctcgctctggatgaaaatttcgatcacaatacacttgcacttatcctccaaatacccacacagaatacccaggcaaggcaggtgatggagagagagtttaataacttactcgccctgggaacagataggaagctggatgatggagacgataaagtgttccggagggctccatcatggagaaaacgattccgacccagggaacatcacggcagggggggaatgctttcagctagcgccgagactctgcccgcaggatttagggtatctacactagggaccctgcagcctccgccagcaccacccaagaagatcatgcccgaagcacactcccactatctgtacgggcatatgctgtctgcattccgtgactag

SEQ ID NO: 30545 - DNA, 1383 bp, synthetic construct
  source 1..1383: mol_type = other DNA; note = Synthetic coding sequence
atggagatctgtgacattataaacgagaccgaagaagggccaaaagatgccctaagagccgtcaagaaacggattgtaggcaacaagaattttcatgaagtcatgctcgccttgacagttctcgaaacttgcgtgaaaaactgtggacacaggtttcatgttcttgtcgccagccaagattttgttgagagtgtgcttgttaggacgatacttccgaagaataatcctcccacgatcgtgcatgacaaggtgctcaatctgattcagtcttgggccgatgcctttcgaagctctccggacctgacgggcgtcgtgacaatctatgaggatctccgcaggaaaggccttgaatttcccatgacggatctggatatgctgtctcctattcacacacctcagcggaccgtgtttaactctgaaactcagagtggacaggactccgttggaacagattcctctcagcaagaggattccgggcagcacgctgccccactcccagcaccccctattctaagcggcgacacacccatcgcaccaacccccgagcagataggcaaactgcgatcagaactggagatggtgtctggcaatgtgagggtgatgtccgagatgttgacagaactggtgccaacccaggccgaacccgctgacctcgaactcctccaagaactcaataggacgtgtcgggctatgcaacaacgtgtactcgagttgattccccagatcgcgaacgaacagctgactgaggagctgcttatcgtgaacgacaatttaaacaacgtttttttaagacacgaacgtttcgagcggtttcggactggccagaccaccaaagccccttcagaagctgaaccagctgcagatttgatcgatatgggaccggatccagctgcaacaggaaatctcagctcccagcttgccggaatgaatctcggaagctccagtgtgagagccggattacagtccttggaggcctcaggacgactggaggacgaattcgatatgtttgctctgactaggggcagtagcctggcagaccagcgaaaagaagttaaatatgaggctccccaggccacggacgggctagccggagcactggatgcccgacagcagtcaaccggggctattccagtaacgcaggcctgtttaatggaggatatcgagcaatggctgtccactgacgttgggaacgatgccgaggagccaaagggtgtcacttctgaggggaaattcgacaagttcctggaggagcgggcaaaagccgctgaccgcttgcctaatctctcctccccctcggctgaaggccctccaggccctccaagcggcccagcccctcggaagaaaactcaggagaaggacgatgacatgctgttcgcactctag

SEQ ID NO: 30546 - DNA, 180 bp, synthetic construct
  source 1..180: mol_type = other DNA; note = Synthetic coding sequence
atgatgatgaagatgatgatgaggatgaagatcaggaagattcgctaccattgccagcgcaagcagaatctcatccacaacaatggcaacggactgggatccgtgcccgtggaaaagctcgtgctgcacccctcaccaatccagaatcctcagcaaagtgctgtggttagctgtgagtag

SEQ ID NO: 30547 - DNA, 537 bp, synthetic construct
  source 1..537: mol_type = other DNA; note = Synthetic coding sequence
atgcttggcttggacgcttgcgagcttggcgctcagctgctggagctcctgcgcttggccctttgcgcacgggtgctcttggccgataaggaaggcggaccacccgcagtcgatgaagtgttggacgaagcagtccccgaataccgagcccctggacgcaaaagcctgctcgagataaggcagctggacccagacgaccgatcactcgccaagtacaagcgggtgttactcgggccactgccacccgctgtggacccctcccttcccaatgttcaggtgactcgcctcacgctcctgtccgagcaagccccaggacccgttgttatggacctgaccggggaccttgccgttctgaaagaccaggtgttcgtgctcaaggagggggtcgactaccgtgtgcatcgagaaattgtaagcggattaaaatgtttacaccacacatatcggcgagggctgcgtgtcgacaagaccgtgtacatggtcggttcctacggtccgagcgcccaggagtatgaatttgtgactcctgtggagtag

SEQ ID NO: 30548 - DNA, 1119 bp, synthetic construct
  source 1..1119: mol_type = other DNA; note = Synthetic coding sequence
atggattctgtgcggagcggccctttcggacaggtgttccgtcccgacaacttcatattcggtcaatgcggcgcaggaaataattgggcaaaaggccattatacagagggggctgaacttatggagagcgttatggacgtggtgaggaaggaggcagagtcctgtgactgtctgcaaggattccagcttacccactccctaggagggggaactgggtctggaatgggtactctcctgctgtctaaaatccgcgaggagtaccccgatcggattattaacaccttttcgatcctgcctagccccaaggtgtccgatactgttgtggaaccgtacaatgccacgctgagcgtgcaccagctcattgaaaacgctgacgagaccttttgcatagacaatgaggccttgtacgacatttgctctaaaactctcaaactccctactcctacttacggcgacctgaaccacctggtgtccgccactatgagtggcgttaccacctgtctcagattcccgggacagctcaacgcagacttgcggaagctggcggtcaacatggtaccctttcccaggctgcattttttcatgccaggctttgctccgttgacttccaggggatctcagcaatatagagctctgactgtggccgagctgacccagcagatgttcgacgcaaagaacatgatggcagcctgcgaccctcggcacgggcgttatcttacggcggctgcaatctttcggggtcgcatgcccatgagagaggttgacgaacagatgtttaacattcaggacaaaaactcttcctatttcgccgactggcttccaaataatgtgaagacggcagtttgtgacattcccccacggggtctcaagatgtcagcgacgttcattgggaacaacacagcaattcaggaattgttcaaaagagtttcagagcaatttacagctatgttccgccgaaaggccttcttacactggtacaccggagagggcatggacgagatggagttcactgaggccgagagtaatatgaatgatctcgtgtctgagtaccagcaatatcaggatgcgacagctgaggaagaagaggatgaggagtacgcggaagaggaagtagcctag

SEQ ID NO: 30549 - DNA, 576 bp, synthetic construct
  source 1..576: mol_type = other DNA; note = Synthetic coding sequence
atggcagcagccaaagatactcacgaggatcacgatacctccacagagaacacggatgagagtaatcacgatccacaattcgagcccatagtctcgctgcccgagcaagagattaagactttagaagaagatgaagaagagttatttaaaatgagggcaaagttgttccgctttgcttccgaaaacgatttgccagagtggaaagagagaggaacaggcgatgtgaaactccttaagcacaagacactcaaaatttgtgcaaatcactacatcacccccatgatggagctcaagccgaacgccggatccgatagagcctgggtttggaacacgcacgccgactttgccgatgagtgtccaaagccggagctgcttgccataagattcctcaatgcagaaagtgagcccagagctctaggcacctgtctcacttggggctctccagcttggcagcggggaggactctgtgctaccaatgccgtggccttctggggcgagggcgctgtgaccggcaaatgtgtggtttgggcagcgctgccttgctgtctgggcgcaatgcccaggctgaagccatag

SEQ ID NO: 30550 - DNA, 369 bp, synthetic construct
  source 1..369: mol_type = other DNA; note = Synthetic coding sequence
atggccacttcagcccctctgaggtctttggaggaagaagtgacgtgtagcatctgtcttgattatttacgggatccggtgaccatcgactgtggacacgtcttctgtcgaagttgcacaaccgatgtgaggccaatctctggaagcaggccggtatgtcctctctgtaagaagccttttaagaaggaaaacattcggcctgtgtggcagctcgcttccctggtggaaaatatcgaaagattaaaggtggacaaaggcagacaacctggcgaagttacgagagagcagcaagatgcaaaactctgtgagcgccacagggagaagctgcattattattgtgaagacgatggaaaactgttatgcgtttag

SEQ ID NO: 30551 - DNA, 1383 bp, synthetic construct
  source 1..1383: mol_type = other DNA; note = Synthetic coding sequence
atggccagccttctccagagcgatagagtcttatatctggttcagggggagaagaaggtgcgggctcccctatctcagttatatttttgcaggtattgcagcgagctgcggagcctggaatgcgttagtcatgaggtggattcccattactgtccatcttgtttggagaacatgccctccgcagaagccaagctcaagaaaaatcgctgtgcaaactgctttgactgccccggttgtatgcacacactgtccacccgcgcaaccagcatctccactcagcttcctgacgacccagcaaaaactaccatgaagaaggcgtattatttggcctgtggattctgcaggtggactagtcgagatgtgggaatggccgacaaatccgtcgcgagcgggggatggcaagagcccgagaacccacacacccagcgtatgaacaaattgatcgaatactatcagcaattggcgcagaaggaaaaagtggagagagacaggaagaagcttgcccgaagacggaactatatgccgctggctttttcagataaatatggcctgggaacacggttgcagcggcctcgggcaggggcttcgatatcaactcttgctggcctctcgctaaaggaaggggaggatcaaaaagaaataaagatcgagccagcccaagccgttgatgaggttgaaccattacctgaggactattacactcgccctgtgaatctgactgaggtgaccaccctacaacagcggctgttgcaacccgactttcaacctgtgtgcgcttcacagctgtacccacgtcacaaacacctgcttatcaaaaggagcctgagatgccggaagtgtgaacacaacttgtcaaaacccgagtttaatcccacctctattaagttcaagatacaactggtggctgtgaattatatccctgaggtcagaattatgagcattccaaatctccgctatatgaaagagtcccaagttttactcacccttaccaatccagtggagaatctgacacatgtgactctgtttgagtgtgaggagggagatcccgatgatattaacagcaccgccaaggtcgtcgttcctccaaaagaattagtgctcgccggaaaggacgccgcagcagagtatgatgagctggcggagcctcaggacttccaggatgacccggacattattgctttccgcaaagctaataaggtcgggattttcataaaagtgacgccccaaagagaagaaggtgaagtgaccgtctgttttaagatgaagcacgattttaaaaacctagctgcccctatccgacccatcgaggaatctgatcagggcacggaggttatttggctgactcagcacgtcgagctctctctaggaccgttgctgccttag

SEQ ID NO: 30552 - DNA, 3336 bp, synthetic construct
  source 1..3336: mol_type = other DNA; note = Synthetic coding sequence
atggagatggacgcgcctcgacctccaagcctcgcggtcccaggcgcagcctcccgcccaggcaggctgcttgacggaggacacgggaggcagcaggtgcaggctttgtcaagtcaattgttggaggtgatacccgattccatgcgaaagcaggaagttaggactggcagagaggccggacaggggcacggaacaggatcacctgccgaacaggttaaggccctgatggatctcttagcgggaaagggatcccagggttcccaggcacctcaggccctggacagaacacctgacgctccactgggaccctgtagtaacgacagccggattcagcgtcacaggaaggcgctcctgtccaaagtgggaggtggtcctgagttggggggtccttggcatcgccttgcaagtcttctactggtggaggggctgaccgatctgcaactgcgtgaacacgacttcactcaagtggaggcaacaagaggcggtggacatccggctaggaccgtcgccctggacaggctgttccttccactgagccgcgtgtccgtcccacccagggtatccattactatcggagtggcgggaatgggcaaaacaaccttggtgaggcattttgtgaggctctgggcgcatggccaagtcggaaaagacttttctttggtgctaccactgaccttccgagatctcaacactcacgagaagctatgtgcagatcgcttaatctgttcagtctttccacacgtgggggaacctagcctggccgtggccgtgcctgcgcgagctctgctgattttagacggcctggacgagtgtagaactcccctcgactttagcaataccgtggcttgcaccgaccccaaaaaggagatcccagttgatcacctaattaccaatatcatccggggtaatctgtttcctgaagtgtctatctggataacaagtaggcccagcgcatcgggacagattcccggaggattggtggacagaatgaccgagataagagggttcaacgaagaagagatcaaggtgtgcctggagcagatgtttccggaggaccaagccctgctgggctggatgctctctcaggtgcaggcggaccgcgctctatatttgatgtgcacggtgcccgctttctgcagacttaccggaatggctctcgggcacctctggagatcgagaaccggccctcaagacgccgagttgtggccccctcgaaccctgtgcgaattatatagttggtatttcagaatggctctgagtggggaaggacaggagaagggtaaggcatcacctcgaatcgaacaggtcgcgcacggaggtagaaagatggtcgggacgctgggacggctcgcatttcatggtctcctgaagaagaaatatgtgttttatgagcaagatatgaaggcatttggtgtggatcttgctctgctgcaaggcgcaccctgttcttgttttttacagagggaggaaaccttggcgagtagcgtcgcttattgctttactcatctgagcttgcaggaatttgtggccgctgcctattattatggtgccagtcgcagggctatctttgatctgtttactgagtcaggcgtctcatggccgagactcgggtttctgactcatttcagaagcgccgcacagcgcgctatgcaagctgaagacgggagactcgacgtgtttttgcggtttctgtcgggattgctgagtccccgtgtcaatgcactgctggctggctctctcctagcccaaggagagcaccaggcttaccggacacaggtcgccgagcttctgcagggctgcctgcggcctgatgccgctgtctgcgcccgagccatcaacgtcctgcattgtctgcatgaactacagcacacagaactcgcaagaagcgttgaagaggcaatggagagcggcgctttagctagactgactgggccagcccaccgagctgctctcgcctacctgctccaggtatctgatgcgtgtgctcaggaggctaatctttcgctgtcactgtcacagggggtgttgcaatccctgttgcctcagcttctgtattgccggaagctgcgattggataccaaccaatttcaggatccagtgatggaactcttgggaagtgtactgtctgggaaagactgcaggattcagaagatcagcctggctgagaaccagattagtaataaaggagccaaagctctggctcgctcactattagtcaatcgatccttgacctcacttgatctgcgcggaaacagtatcggaccacagggggctaaggcgctggcggatgccctgaagataaacagaacactgaccagtctttccctgcaaggcaacacagtgagggatgatggcgctagatcaatggccgaggccctcgcgtcaaaccggactctgtccatgttgcatctgcagaaaaatagtattgggccaatgggggcacagcggatggccgatttaaaacagaatcggagtctaaaggagctgatgttttcttccaactcaatcggagatggaggagccaaagccctcgcagaagcgctgaaggttaatcaggggttggagtctctcgaccttcagtctaacagcatatctgatgccggagtggctgccctgatgggcgctctgtgtaccaatcaaactcttctgagtctatcgctgagggaaaattctatttcaccagagggtgctcaagcaatcgctcacgccttatgtgccaactccactctgaaaaacctggacctgaccgccaatttgctgcatgatcagggggcaagagcgattgccgttgctgtcagagaaaaccgaactctcacctctttacacctgcagtggaatttcattcaagccggagcggctcaggcgctcggccaggctctgcagctgaacagatccttaacatccctagatctgcaggaaaatgcaattggggacgatggcgcttgcgctgtggccagggctctgaaggtcaacacagctctcacagccctgtacttgcaagtggcttctattggtgcgtctggagcccaggttcttggggaagcactcgctgtgaacaggactttagaaatcctggacttgagggggaatgcgataggggttgcaggagcaaaggccctggccaacgccctcaaagtgaattcttctctgcggagactgaacctgcaggaaaactctctcggaatggatggagccatctgcattgccactgcgctttccggcaatcatagactgcaacacatcaacctccagggtaaccacatcggagattctggtgcgaggatgatctctgaggcgatcaaaactaatgctccaacttgcacagtcgagatgtag

SEQ ID NO: 30553 - DNA, 2424 bp, synthetic construct
  source 1..2424: mol_type = other DNA; note = Synthetic coding sequence
atgcttgagcgtagagccctcttgtggcagagggaagctggaccaggctggggagaccgggcaagggccggaaccgggggagcgggaggcggatgtggcggagccatggccgagaggggacctgctttttgtggcctgtacgatacttcgagtctactcagatactgcaatgatgacaatctttccgggacgtctgggatggaggtcgatgatagggtgagtgccttagagcagaggttgcagcttcaggaggatgaactggccgtgttaaaggccgctctcgcagatgccctgaggaggctgcgggcttgtgaggagcagggagctgcattgagggctagaggcacccctaagggccgagcaccccctcggcttggcaccaccgcgtcagtctgtcagctcctcaaaggtcttcctacaaggacccctctgaatggttcagggcctcctcgcagagtagggggttatgctacaagccctagctctccgaaaaaggaggcgacttcggggagatctagcgtgcggagatatttatcccccgaacggctggccagcgttagaagggaggatccgaggagtagaacgacatcaagctcaagcaattgttccgcgaagaaagagggcaagaccaaggaagtgatcttctccgttgaagacggatctgtgaaaatgtttttaaggggtcgaccagtgccaatgatgattccagatgagcttgcccctacatattccttagatacccgcagcgagctgccaagttgtcggctgaaattggagtgggtgtacggctatagaggaagggattgccgcgctaatctgtatctgcttccaactggggagatcgtctatttcgtggcaagcgtcgccgtcctttattcggtcgaggagcagaggcagaggcattatcttggccataatgatgatattaagtgtctggccattcaccccgacatggtcactattgccacaggacaggtggcaggaactacaaaagaaggcaaaccacttcctccacacgtgaggatttgggactctgtgtccctgtctacactgcacgtgcttggcctcggggttttcgatagggctgtatgctgcgtgggtttctccaagagtaacggcggaaatctcctatgtgcagttgatgaatccaatgaccacatgttgagcgtgtgggattgggctaaggaaactaaggtggtggatgtgaagtgctctaatgaggctgtcctggtggcaacctttcacccaacagatcccactgtccttatcacttgcggcaagtcacatatctatttttggacactggagggtgggtctttatcaaaaagacaaggcctttttgagaaacatgaaaaaccgaagtatgtcctttgtgtgacttttcttgaaggcggagatgtcgtgaccggtgactctgggggtaatttatacgtttggggcaaggggggaaaccggattactcaggcggtgctgggggcacacgacggcggagtctttgggctgtgcgccctgcgcgatgggacactggtttccggaggtgggaggaattcgattctccagggttctgttcatacaggctttagcctgctggtgcaagggcacgtcgaagaactttgggggctggccacccacccgagccgggctcagtttgtcacctgcggccaagataagttagtacatctctggtcctcagactcacaccagccgctgtggagcagaatcatcgaagatcctgctcgttccgccggatttcacccaagtggctcagtcctcgctgtgggaaccgtgacaggtaggtggctcctgcttgacacggagactcacgacctggtggccatccacactgatggaaacgagcaaattagcgtcgtgagcttcagccccgacggagcctacctagcagtcgggagccacgataatctcgtgtatgtctatacagtggaccagggaggaaggaaagtctctaggctggggaagtgctccggccactcctccttcatcacacacctagattgggcccaggacagtagctgttttgtgacaaattcaggggattacgaaatcctgtactgggatcctgcaacatgtaaacagataacctcggcagatgccgtgcgcaacatggagtgggcgaccgccacctgtgtgctcggatttggagtgtttgggatctggtcagaaggcgcagatggcaccgatatcaacgctgtggcaaggtcccacgacggtaagttgttggcttctgccgatgattttggcaaagtccatttattctcgtacccttgttgccagccacgcgcactgagccacaaatacggaggtcacagttctcacgtgacaaacgttgcttttttgtgggatgactccatggctctcacaacaggcggtaaggatacatccgtgctccagtggcgagtggtgtag

SEQ ID NO: 30554 - DNA, 1413 bp, synthetic construct
  source 1..1413: mol_type = other DNA; note = Synthetic coding sequence
atggaggagacaattaaggatcctccgactagtgctgtgctcctggaccactgtcacttctctcaagttattttcaattccgttgagaaattctacattcctggaggagacgttacctgtcattacacctttacccagcactttatacctagaagaaaggactggatcggtatcttccgggctttcaaatgttttcaggacaagctggagcaggaacttctgaaatggcggagccaaggtcagaagctacaggtgggatggaagacaaccagggaatactacacatttatgtgggtgactctccccattgatctgaataataagagcgcgaagcagcaagaggtacagttcaaggcctactacctcccaaaggatgacgagtattaccagttctgctacgttgacgaggacggcgtcgtgaggggcgcttcgattcctttccagtttcggcctgaaaacgaggaagacattctcgtggtaacaacgcagggggaggtcgaggagattgagcagcacaataaggagctgtgcaaagaaaaccaagagctcaaggactcctgtatcagcttacaaaaacagaacagcgacatgcaggcggaactgcagaaaaaacaggaagaacttgagactctccaaagcattaacaagaagctggaactcaaggttaaagaacaaaaagactactgggagaccgagctgttgcagctcaaggaacagaaccaaaagatgagctccgagaacgaaaaaatggggattcgtgtggaccagctccaggcacagctatcaacccaggaaaaggagatggagaagctcgtccagggagatcaagacaaaacggaacagctggagcagctgaaaaaggagaatgaccacctgtttttgagtctaaccgagcaacgcaaagatcagaaaaagttggagcagaccgtggaacagatgaagcagaacgagacaactgcaatgaagaagcagcaggaactgatggacgaaaactttgatttatccaagaggctgagtgaaaatgaaatcatttgcaacgcccttcagcgccagaaagagcgcctagagggcgagaacgacctcctgaaacgggagaattctaggctgttgagttatatggggctggattttaactctctgccttaccaggtgcccacgagtgatgaagggggtgcgaggcaaaatccgggactggcctatgggaacccttactctggcatccaggagtcctcttcgccatctcctctcagcatcaagaaatgcccaatatgcaaagctgacgatatttgcgatcacactttagagcagcagcaaatgcaaccactgtgcttcaattgtcctatctgcgataagatttttcccgcaaccgagaaacaaatcttcgaagatcacgtgttttgccactcactttag

SEQ ID NO: 30555 - DNA, 1023 bp, synthetic construct
  source 1..1023: mol_type = other DNA; note = Synthetic coding sequence
atgagcaagacgcacgaccatcagctagaaagttcattgtcgccagtagaagtgtttgccaagacttccgcttcactagaaatgaaccaaggggtgagcgaagaacggattcatctgggtagctccccaaaaaaaggaggcaattgcgatctgagccatcaagaaagactccagtcaaaatccctgcatcttagtcctcaagaacagtctgcttcatatcaggaccgcagacagtcatggaggcgtgcttctatgaaggaaactaacagaagaaaaagcctccatccaatccatcaggggattaccgaactttctcgatctattagcgtggatttagctgaaagcaagaggttgggctgcttgctgctgagcagttttcagttcagcatccagaaactggaaccctttttaagggacactaaaggctttagtctggagagcttccgtgccaaggcttcatccctgtctgaagaactcaaacactttgctgatggcttggaaaccgacggaacacttcagaagtgcttcgaggactcaaacggcaaggcaagcgattttagtctggaggccagcgtcgcggagatgaaggagtatattactaagttcagtctagaaaggcagacatgggatcagctacttctgcattaccagcaggaggccaaggagattctgtcacgagggtcaacagaggctaaaatcactgaggtgaaagttgaaccaatgacttatcttggttcttctcaaaatgaggtcctgaatacaaagccagattaccaaaaaatcctacaaaaccagagtaaggtgtttgactgtatggaattagtcatggacgaactacaaggtagcgttaagcagctccaggcttttatggatgagagcacacagtgttttcaaaaggtatctgtccagttgggaaaaagatctatgcagcagctggatcccagccctgccaggaagctccttaagcttcagttacagaacccccctgccattcacggatccggaagcggcagctgccaatag

SEQ ID NO: 30556 - DNA, 522 bp, synthetic construct
  source 1..522: mol_type = other DNA; note = Synthetic coding sequence
atgacacatgtcgcttcccagtttgcttcttcttatgtattttattggcgcgattatttcgaagatcagcctttattatatcctccgggtttcgacggaagggtcgtggtgtaccccagtaatcagacacttaaggattacttaagttggcgccaggcagactgccacatcaataacttgtataatactgttttttgggctcttatccagcaatctgggctaacaccagtgcaggcccagggcaggcttcaggggactctggcagcagacaaaaatgagatcctattttctgagtttaacatcaactacaacaatgaattgccaatgtatagaaaaggaaccgtcctgatttggcaaaaagttgatgaggtcatgacgaaggaaattaaactgccgaccgagatggaggggaagaagatggctgtgacccgcactcgaaccaagcccgttcctctccactgcgacattatcggggacgctttctggaaggagcaccctgaaattctggatgaagactcttag

SEQ ID NO: 30557 - DNA, 285 bp, synthetic construct
  source 1..285: mol_type = other DNA; note = Synthetic coding sequence
atggagatggagtcagcagccgcttcaacaaggttccaccaaccgcatatggagcggaagatgagtgctatggcgtgtgaaattttcaatgagctgagattggaaggaaagctttgcgacgtagtgataaaggtgaatggcttcgagttttctgcccacaagaacattctgtgcagctgttctagctacttccgtgcacttttcacaagcggatggaacaataccgagaaaaaagtctacaatataccagggatctcacccgacatgatgaagctgattatttag

SEQ ID NO: 30558 - DNA, 1572 bp, synthetic construct
  source 1..1572: mol_type = other DNA; note = Synthetic coding sequence
atgaaccagccttgtaattcaatggagcccagagtgatggacgacgatatgttgaagctcgcggttggcgatcaggggcctcaagaagaggcgggtcagctggctaaacaggagggtatcctgtttaaagatgtgctctccctgcagctggattttaggaacatcctgagaatcgacaatctctggcagttcgaaaatcttcggaaactccaactggacaacaatattattgagaagatagagggcttagaaaacctggcccacctggtgtggctggacctcagttttaacaacatcgagacaatcgaagggctggacactctggttaatttagaggatctgagtctgttcaacaacaggatatccaaaatcgactcgctcgacgcgcttgtcaaactccaggtcctcagtctgggcaacaacaggattgataatatgatgaatattatatacctgcgacgcttcaagtgccttcggaccttgagtctgtccaggaaccctatttccgaagccgaggactacaaaatgttcatctgcgcgtacctcccagatctaatgtacctcgattacaggcgaattgacgatcacacaaagaagctcgcagaggccaaacatcagtactcaatcgacgaacttaagcaccaggagaatctgatgcaggctcagttggaggacgagcaggctcagcgagaggagctagagaagcacaagacggcattcgtcgagcacctgaacgggagctttctcttcgactcaatgtatgccgaagactctgagggtaataacttgagttatttgcctggtgtaggtgagctgctggaaacgtataaggacaaatttgtcataatttgtgtgaacatttttgaatatgggctcaaacaacaggagaagcgcaagacggagctggacacgttttctgagtgcgtgagggaagcgatccaggagaatcaggagcagggcaaacgaaaaattgcgaagttcgaggagaaacacctctcctccttatccgccattcgggaggagctcgaattgcccaatatcgaaaagatgattttagaatgctcggccgacatcagtgaactatttgatgccctgatgaccctggaaatgcagttggtagaacagctagaggagactattaatatgtttgagcgcaatattgttgacatggtgggtctctttattgagaacgtgcaatcactgatggcacagtgtcgggatttggaaaatcaccatcatgaaaaactccttgagatcagtatctcaactctggagaaaatcgtggagggcgacttggatgaggatctgccaaacgacctgcgggctctatttgtcgataaggacacgatcgtcaatgccgtcggggctagtcacgatatccatctgctgaagattgataatagggaggacgagctcgtgacgagaataaatagctggtgcaccaggttaattgacagaattcacaaggacgaaattatgaggaatcggaagcgcgttaaagaaatcaaccagtacattgatcatatgcaaagtgagctggacaatttagagtgcggcgatattctggactag

SEQ ID NO: 30559 - DNA, 372 bp, synthetic construct
  source 1..372: mol_type = other DNA; note = Synthetic coding sequence
atgggcacaggtgatttcatctgtattagcatgactgggggagctccatgggggttccggctgcaagggggaaaggagcagaagcagccactgcaggtcgccaaaattaggaaccagtccaaagcaagcggcagcgggctttgcgagggcgacgaggtggtttccatcaatggcaatccttgtgccgatttgacatatcccgaagtgattaaactgatggagtccattaccgatagcctacagatgctgatcaaacgccgtgtgggcgctcccttcctttttctcgaagaccaatctcacccgcctttcctccaccttctgggctacacctcattgttgatcgtgactctcgttaaccagcctatggactag

SEQ ID NO: 30560 - DNA, 1146 bp, synthetic construct
  source 1..1146: mol_type = other DNA; note = Synthetic coding sequence
atgcccctccaggtttctgattatagttggcagcaaaccaagacagctgtgtttctgtctctgcccctgaagggcgtttgcgttagggacacagatgtcttttgtaccgaaaactacctgaaagtcaacttcccgccattcctgttcgaggcctttctgtatgcacctatcgatgacgagagttctaaagcaaagatcggtaatgatacgattgtctttacgttgtacaaaaaagaagccgcaatgtgggaaactctttctgtgacaggggtggacaaggagatgatgcagaggattcgcgagaagtctatcttgcaggcccaggagcgggctaaggaagctactgaagccaaggctgctgccaagcgggaggaccaaaagtacgcactgtctgtaatgatgaagatcgaagaagaggagagaaaaaagattgaagacatgaaggaaaatgagaggattaaggccactaaggctttagaggcgtggaaggagtaccaacgaaaggctgaggagcagaagaagatccaacgcgaggagaagctatgccaaaaagagaagcagataaaggaagagaggaagaaaatcaagtacaagtctctcaccagaaatctcgcctcgcgcaatctggcacccaaaggcaggaactccgaaaatatctttactgagaaattaaaggaagactccatacccgcacctaggtccgttgggagcattaaaatcaatttcacccccagagtgttccctactgctttgcgggagagccaggtggcggaggaagaagagtggctacacaagcaggctgaagcaagacgggcaatgaatacggatattgcagagctgtgtgacctaaaggaggaggagaagaatcccgaatggctgaaagacaaggggaacaaactgtttgctacagaaaactatcttgctgcaattaatgcttataacttagcgatcaggcttaacaataaaatgcctttgctttatcttaatcgggctgcatgtcacttgaaactgaagaacttacataaagcaattgaggatagttccaaagagttctgcagccttgaggggattgagtgtcaggcctccgaaccaaaattgtctcaccacatcccatccgatttacatgtgtatatccaaatggcctag

SEQ ID NO: 30561 - DNA, 615 bp, synthetic construct
  source 1..615: mol_type = other DNA; note = Synthetic coding sequence
atggtcatggcggaggggaccgccgtgctccgcagaaacagaccaggcacaaaagcccagtacattcaacaaaacatcagagcagactgctcaaatatcgataaaatcttggaacctccagaaggccaggatgagggcgtatggaaatatgaacacttacgacagttctgtctggagctcaatgggctcgccgtgaaactgcaaagtgagtgccaccccgacacctgtacacaaatgaccgcaactgaacagtggatctttctctgtgccgctcataagaccccaaaggagtgccctgcaatcgactatacacggcatacactagatggagctgcttgcctcttgaattcgaataagtatttcccttcacgagtgtctatcaaagagtctagcgttgcgaaattaggctcagtatgtcgtagaatatataggatcttctcgcatgcatatttccaccacagacaaattttcgacgaatatgagaacgagacattcctttgtcacagatttaccaagtttgtgatgaaatacaatctgatgtccaaggataatctgatcgttcctatactcgaagaagaagttcagaacagcgtgtccggcgagtcagaggcttag

SEQ ID NO: 30562 - DNA, 1293 bp, synthetic construct
  source 1..1293: mol_type = other DNA; note = Synthetic coding sequence
atggcagccaatctatcccgtaatggccctgccctccaagaggcatatgttcgcgtggtcaccgagaagtctccgaccgattgggccttattcacatacgagggcaacagcaacgacatcagggttgccggaacaggagaagggggactcgaagagatggtggaagagttaaatagcggtaaggttatgtacgctttctgccgtgttaaagatcccaatagcggcctacctaagttcgtcctgatcaattggaccggtgagggagtgaatgacgtgcgcaaaggcgcatgcgcctcccatgtgtctaccatggccagctttctgaaaggtgctcacgtaaccataaacgcacgggcagaggaagatgttgagccagagtgtatcatggaaaaagttgcaaaggcaagtggagcaaactacagcttccataaggagtccggccgatttcaagacgtgggcccacaagcgcctgtcggttctgtgtatcaaaagacaaacgccgtttccgagatcaaacgggttggtaaggatagcttttgggctaaggccgagaaggaggaggaaaatcggcgactcgaagagaagcgtcgcgctgaggaggcccagagacagctggaacaggaacggagagaaagagagcttcgggaagccgctcggagggaacagcggtatcaggagcaaggtggagaagcttcccctcagagaacatgggaacaacagcaagaggtggtctctcggaacagaaacgaacaagagagtgccgtccacccgagagagattttcaagcaaaaagaaagggcaatgtcaactaccagcatatctagtccacagccaggtaaactgaggtcgccttttcttcaaaagcagctcactcagccagagacccacttcggccgagagccagcagcagccatctcaagaccgagggccgacttacctgccgaagaaccagccccatctactcctccatgtctcgtgcaagccgaagaagaggccgtgtacgaagaaccccctgaacaggaaacattttacgaacagcctccactcgtacagcagcaaggagctggctccgagcacatagaccaccatatacaggggcaaggtttaagcggacagggtttatgcgccagggccctctacgattaccaagccgcagacgacaccgaaatcagtttcgaccccgagaatcttatcacggggattgaagtgattgacgagggctggtggagagggtatggccctgacgggcactttggtatgttccccgctaactatgtggagttgatcgaatag

SEQ ID NO: 30563 - DNA, 3189 bp, synthetic construct
  source 1..3189: mol_type = other DNA; note = Synthetic coding sequence
atggtatcgtcagcacagatgggattcaacctgcaggccttgctggagcaacttagccaggatgaactgagtaagtttaagtacctgatcaccactttctccctcgctcacgagctgcaaaagatacctcacaaagaagttgacaaagctgacggtaagcagcttgtcgagatcctcaccacacattgcgattcctattgggtcgagatggccagtctgcaagtctttgagaagatgcacaggatggacctgtctgagagggctaaggatgaagtccgtgaggccgcactgaaatcctttaataaaagaaaaccgttgtctctcggaatcacacgaaaagaacgaccccctctggatgtagacgagatgctggaacggtttaagacagaagctcaagcttttacagaaacaaagggcaacgtcatttgcctgggaaaagaggttttcaaggggaagaagccagataaagacaatcgctgtaggtacattctgaagactaaattccgagagatgtggaagtcttggcccggagactctaaagaggtccaggtcatggccgaacgctacaagatgctcattcctttttcgaaccccagggtccttccgggtcccttttcatacacggtggtcctttacggccctgctggcttaggcaaaaccactctggctcagaaactcatgctggactgggccgaagataacctgattcacaagttcaaatacgccttttatctgtcgtgcagggagttgtcccggctaggcccatgtagtttcgccgaacttgtcttcagggattggcccgagctccaggatgatatcccccatattctggctcaggctagaaagatcttgtttgttatagatggtttcgacgaacttggagccgctccaggcgctctaattgaggacatatgtggcgattgggagaagaagaaaccagtgccagtactattaggaagcctacttaatagagtcatgcttcccaaagctgctctcctggtgaccacacgcccacgcgctcttagggacctgcggattctcgctgaggagccaatctacattcgggttgaagggtttcttgaagaggataggagagcatatttcttgcggcacttcggcgacgaagaccaggccatgcgtgcattcgagcttatgaggtctaacgccgcactgttccaactcggaagcgcccctgccgtctgttggatcgtatgtacaaccctgaaattacagatggaaaaaggggaggacccagtgcccacctgcttgacaaggactgggcttttcttgcgatttctgtgttctagatttccgcagggagctcagctgcgcggagccctgagaactctgtctttgcttgctgcccagggattgtgggcccagacttctgtgctgcatcgcgaagatctcgaaagactcggggtgcaggaaagcgatttacgactgtttttggacggtgatatcctacggcaggatcgtgtaagcaaggggtgttactcttttattcacctgtcatttcagcagttccttaccgcactgttttatactctcgaaaaagaggaagaagaggaccgggatgggcacacctgggacattggcgacgtgcagaagctgctcagtggggttgagcgactgaggaatcccgatctgattcaggccggatattatagtttcggactggcgaatgagaagagggccaaggaacttgaggcgacttttgggtgtcggatgagcccagacattaaacaagagctgttaagatgcgacatcagctgcaagggaggtcactccacagtgaccgatctgcaggaactgctggggtgcttatacgaaagccaggaggaagagctagtgaaggaagttatggcccaattcaaagaaatctcccttcatctcaacgcagttgatgtagttccctcctctttttgtgtcaaacactgcaggaacctgcaaaaaatgtccctgcaggtgataaaagaaaacttacccgaaaacgttacagcctccgagtcagatgctgaggtggaacgatctcaggatgaccagcatatgctccctttttggaccgatttgtgttcaatcttcggctcgaacaaagatcttatgggcctggcgattaatgactcattcctgtccgcatctctcgtccggatcctgtgcgagcagatcgcatctgacacatgccacttacagcgggttgtattcaaaaacatctcacctgccgacgcccatcgcaacttatgtttagccttacggggacacaaaactgtaacttacttgacactgcagggaaacgatcaggacgacatgttcccagccctgtgcgaagtgttgagacaccctgaatgcaatctcaggtatctgggactggtgtcttgctctgcgacaacccagcagtgggctgatctaagcctagccttggaggtgaatcagtcactcacttgcgtcaacttaagcgacaacgagctcctcgatgagggcgctaagctactttatacaacccttagacaccctaagtgcttcctgcagcgtctgtctcttgagaactgtcaccttaccgaagccaattgcaaggacctggccgctgttctcgtcgtttctcgcgagttaacacatctctgtctggccaaaaatcctatcggaaatactggggtcaaatttctctgcgagggactgaggtatccggagtgcaagctgcaaacactggtactttggaactgtgacatcactagtgatgggtgctgcgatctcacgaagttacttcaggagaaatcttccctgctctgtctggatttgggattgaatcatattggcgtgaagggcatgaaatttctctgtgaggccctgcggaaacctctatgcaacctgagatgcctatggctgtgggggtgttcaatcccccctttctcctgtgaggacctttgtagcgcacttagctgcaaccagagtcttgtgacactggatctcgggcaaaatccattgggttcgagcggggtcaaaatgctgttcgaaaccttgacatgttcttctggcacactcagaacactaagactgaagatcgatgattttaatgacgaactcaacaagctactcgaggagatcgaagagaagaacccacaactcattattgacacggagaaacaccatccttgggctgaaaggcctagttcacatgatttcatgatctag

SEQ ID NO: 30564 - DNA, 390 bp, synthetic construct
  source 1..390: mol_type = other DNA; note = Synthetic coding sequence
atggctgaactaatccagaaaaagctgcagggcgaggtggagaaatatcagcagctacagaaggacttgagtaaatctatgagcggaaggcaaaagctggaggctcagctgaccgaaaacaatatcgtaaaggaagagctggccctgctagacggctccaacgttgtttttaagcttctcgggccagttctggtcaagcaggagctcggagaggcccgagcaacagtcggaaaacgcctggactacattaccgcagagatcaagcggtatgagtcccaactgagggacctggagagacagagcgagcagcaaagggagactttggcacaacttcaacaagagttccagagagcccaggccgcaaaggccggtgctccgggaaaggcgtag

SEQ ID NO: 30565 - DNA, 516 bp, synthetic construct
  source 1..516: mol_type = other DNA; note = Synthetic coding sequence
atggaggtggcagagccatcatcacctacagaggaggaagaagaagaggaagaacactctgcggaacctcggccaaggacgcggtccaaccccgaaggggcagaagatcgggctgtgggtgcccaggcttccgtgggctcacgcagtgaaggcgagggtgaggccgcatctgcagatgacgggtcgttaaatacctccggcgctggacccaaatcatggcaggtgcccccaccagccccagaggtccagatccgtactcctcgggtcaattgccctgagaaagtcattatctgcctggacctctcagaggagatgagcttgcctaagttggagtctttcaacggccagcaaaaaaccgaactgcctgttaccgagaacgtccaaaccattccacccccttacgtggtccgaaccatcctcgtctacagtcgtccaccatgtcagcctcagttttcactaacagagcccatgaaagttggggaagcatgggagagggaaggctgtctccagccatag

SEQ ID NO: 30566 - DNA, 1446 bp, synthetic construct
  source 1..1446: mol_type = other DNA; note = Synthetic coding sequence
atggcctctgctgcctccgttaccagcttggccgatgaggtgaattgccctatctgtcagggtacgctcagggagccagtgacaatcgactgcggccacaacttctgcagagcatgtctgactagatactgtgaaatacccggacccgacctagaggagagcccgacttgtcctctgtgtaaggagccttttcgccctgggagtttcaggccaaactggcaactcgctaacgtggttgaaaatatcgaaaggctgcaattggtcagcaccctgggcctcggggaagaggacgtgtgccaggagcacggcgagaaaatctattttttttgcgaggatgacgaaatgcagctgtgtgtggtttgtcgcgaggctggggagcatgcaacacacaccatgcggttcttagaagacgccgctgcaccctatcgcgagcagattcacaagtgcttaaaatgtctgcggaaggagagggaagagatccaggagattcagtcacgcgagaataagcgcatgcaggtgttgctgactcaggtttcgacaaagagacagcaggtgatcagtgaattcgcccacttgcgaaagtttctggaggagcagcagtctattctgttggcccagttggagagtcaggacggcgatatattaaggcagcgtgatgaatttgaccttttggttgcaggcgagatttgcaggtttagcgcgttgattgaggaattggaggaaaaaaacgaacgacccgctcgagagcttctgacagacattaggtctactctaataagatgtgagacgagaaaatgtagaaaacccgtggccgtctcccctgagttgggacagcgcattcgagatttcccacagcaggccctccctctgcagagagagatgaaaatgtttctggaaaaactctgcttcgagttggattatgaaccggctcacatatccctcgacccgcagacttcacatcccaaactgctgctttctgaggaccatcagcgagcccaatttagttacaagtggcagaattctcccgacaacccacaaaggtttgaccgcgcaacatgtgttctcgcgcacaccgggattacaggtggcaggcatacttgggttgtttcaattgatctggcccacggcggttcctgtaccgtgggcgtggtaagcgaggatgtacagcggaagggcgaactccggctgcgacctgaagagggggtgtgggccgtaaggctcgcatggggctttgttagtgcattaggcagcttcccgaccaggttaacccttaaagagcagcccaggcaagtccgcgtgtcactggattatgaagttggctgggtaacgttcaccaacgccgtgaccagagagccaatatacactttcacggcttcttttacgcgcaaagtaatcccattcttcgggctctgggggcgtgggagttcgtttagtttgagcagttag

SEQ ID NO: 30567 - DNA, 1986 bp, synthetic construct
  source 1..1986: mol_type = other DNA; note = Synthetic coding sequence
atgaataccgggcgagactcacagagtcctgactctgcctggcggtcctataatgacgggaatcaggaaacactgaatggagatgcgacttattcctcattggctgccaagggttttaggtccgtcagaccaaacctacaggacaagcgctcgcccacccagagccaaatcaccgttaatggaaatagtggtggggctgttagccctatgagttattaccaacgcccattttccccctccgcctactccctgccggcatcattgaattcaagcatcgtaatgcagcatgggacttcactcgattccaccgacacatatccacagcacgcccaaagtcttgacggaacgacatcgtcctcaatcccgctgtaccgcagcagcgaggaggagaagcgagtgacagtaatcaaggccccacactaccccggaattgggcctgtggatgagagcggcattcctaccgcgataagaaccaccgtcgatcgacctaaggactggtacaagacaatgttcaaacagattcatatggtgcataaaccagatgatgatactgatatgtataacactccctacacatacaacgccggattatacaaccccccatactctgctcaatcccatccagccgctaagacccagacatacaggccactgtcaaaatctcattctgacaattcacccaatgccttcaaagacgccagcagtcctgtgcctccccctcatgtcccaccacctgtgcccccattaagacccagggatcgttcctctacggagaagcacgattgggacccccctgacaggaaggtcgatacccgaaaattcaggagtgagcctaggtccattttcgagtacgaaccaggtaagtcatctatcctgcagcacgagaggcctcccccaaagaagcctcttgactatgtgcaagatcattccagcggggtgtttaatgaagccagtctgtatcagtcatccatagatagatcacttgagaggcccatgtcctcagccagcatggcatccgatttcagaaagaggcgaaagtcagaacccgcagttgggcctcctcgcggactgggtgatcagtccgcttctagaactagtcctggaagggtggatctgcctggatcaagtaccacccttaccaaatcattcacaagttctagtccctcgtcaccatcccgggcaaaagatagagagtccccgcgtagctactcttccaccctgacagatatgggcaggtcagcccctcgcgagagaagagggactcccgagaaggagaagctccccgctaaggcagtttacgactttaaggcccagacaagcaaagagctatcattcaaaaagggagataccgtctacatattgagaaaaatcgaccagaactggtatgagggcgaacatcacgggcgtgtgggaattttccccatttcttacgtcgaaaaactgaccccccctgagaaggcccagcccgctaggccacccccacctgcgcagcccggagagatcggtgaagcgattgccaagtataactttaatgcagacaccaatgtcgagctatcactccgaaaaggagatagagtgatccttctgaagcgggttgatcaaaactggtacgaaggaaagattccaggtaccaacagacaggggatctttccagtctcatacgtcgaggtcgttaagaaaaacactaaaggggcagaagattatccagacccgccaattccgcactcttatagctcagatagaatccacagcctgtccagcaacaaacctcagaggcccgtgtttacacacgagaatatccaggggggaggggaacctttccaggccttgtataactatacacccaggaatgaggacgaactcgagctgcgggagagtgacgttatcgacgtgatggaaaagtgtgatgacgggtggtttgtgggtacatctcggagaactaagttcttcggcaccttccctgggaactacgtgaagaggttgtag

SEQ ID NO: 30568 - DNA, 483 bp, synthetic construct
  source 1..483: mol_type = other DNA; note = Synthetic coding sequence
atggaggcggaaaggcctcaagaagaggaagatggcgaacaggggccacctcaggacgaggaaggttggccacctcccaattccacaacacgcccatggaggagcgcaccaccgtctccccctcctccaggtacccggcacaccgcactgggacctcgatctgcctctttgctatcgctacagaccgagcttctgctagacttggttgccgaggcacagagtcgtagactggaagaacaaagggcaactttctacaccccgcagaatccttcatcgctggcgcctgcaccactgaggcccctcgaggacagagagcaactgtactctaccatcctcagccaccagtgtcaacggatggaagcacagcggagcgaaccacctctgccacctggaggacaagagctgctggagctcttgcttagagttcaggggggtgggcgaatggaggagcaaagatctaggcctccaacgcacacttgttag

SEQ ID NO: 30569 - DNA, 717 bp, synthetic construct
  source 1..717: mol_type = other DNA; note = Synthetic coding sequence
atggattgtagagagatggacctctatgaagattatcagtcaccttttgactttgacgcaggagttaataaatcctacctgtatctgtcacccagcggaaattcgagtccacctggttctccaactctccagaagttcggcctcttgcggactgaccccgtcccagaagaaggggaggacgtggcagccactataagtgccactgagaccctgtcggaggaggagcaagaagaactgagacgggaactagctaaggtcgaggaggagatccagactctaagccaagtgcttgctgcgaaggagaaacacctagcagaaataaaaaggaagttgggtattaattcactccaggagctgaaacagaatattgccaaagggtggcaggatgtgacagctacctcagcttataagaaaacaagcgaaaccctgagccaggcgggtcagaaggcttccgccgcattctcatcagtgggctctgtgattacaaaaaagctggaggacgtgaatatcaggagcatccagcatagcattagcatgccagctatgcggaattcacctacttttaagtccttcgaggagaaagtggaaaatctgaagtctaaggtcggtggaactaagcccgcagggggtgacttcggagaggttttaaacagtgcagccaatgctagtgctacaactactgaacccttacctgagaaaacacaagagtcactctag

SEQ ID NO: 30570 - DNA, 108 bp, synthetic construct
  source 1..108: mol_type = other DNA; note = Synthetic coding sequence
atgcaaacatctagctcaaggagtgtccacctgtccgagtggcagaaaaattacttcgccattacttctggcatctgtactggacccaaggccgacgcctacagatag

SEQ ID NO: 30571 - DNA, 327 bp, synthetic construct
  source 1..327: mol_type = other DNA; note = Synthetic coding sequence
atgacccggggaaatcagagagaactcgctcggcagaagaatatgaagaagcagtccgattccgtgaaaggtaagcgaagggatgacggcttaagcgcggctgccagaaaacagtcagcgatcacttcatctcgcaatttcctgtatcctgcatatgtctactttccatcatcagtgccgagcccgcctaggaaatacacacaaacttattacgctgctgtgccggcaggatggtggggcagcggcggaggcccagcaacccagccggcagcgggtggcaggtggagatttcttcatattcttggcacacagccccagagtcactag

SEQ ID NO: 30572 - DNA, 846 bp, synthetic construct
  source 1..846: mol_type = other DNA; note = Synthetic coding sequence
atgggagctggtaatctgccccctattacacaggaggaagctctgcacatcctcggatttcagccaccgtttgaagacattaggtttggaccttttactggcaacacaacattgatgagatggttccgacaaatcaatgatcacttccacgtcaaaggatgcagttatgttctgtacaaaccacacggcaagaataaaaccgccggagagacagcctccggggctttaagcaaactgaccaggggactgaaagatgaaagtttggcatatatctatcactgccagaatcattacttctgtccaatcgggtttgaagccacgcccgtcaaggccaataaggcgttttcccggggacctctgtctccacaagaggtcgaatactggatcctcatcggggagtcaagcagaaagcaccccgcaattcactgcaaaaagtgggcagacatagtgaccgatctaaatactcagaaccccgaatacctggacatcaggcacctggagaggggtcttcagtacaggaagaccaagaagcccacatttttctcatctcaggtcgggggaaacctccactgtattatcgcttttcagcgcctgaactggcagcgctttgggctgtggaactttccgttcggtaccatacgccaagaaagtcagccaccaacccacgctcaggggatagctaagtccgagagcgaagataacatctccaagaaacaacacggcagactaggtagatccttctcggccagctttcaccaggactctgcctggaaaaagatgagtagcatacatgagagaaggaattccggttaccagggttacagcgattacgacgggaacgactag

SEQ ID NO: 30573 - DNA, 213 bp, synthetic construct
  source 1..213: mol_type = other DNA; note = Synthetic coding sequence
atgagagcattgacggtacagcgcgtgaagtttgccatggaccttcccctgctcaagcgcgctgggcaggacttagctgagaaaaccaagaattttgttagccgatccttggtgatcggggaagttttgtccatggcggacatggctaccggggtcaaatgtgggattatttactggctttttggaggagctatccgaaatctgggctcttag

SEQ ID NO: 30574 - DNA, 1644 bp, synthetic construct
  source 1..1644: mol_type = other DNA; note = Synthetic coding sequence
atggcaggtacaaagaataagaccagggcccaagccaagaccgaaaagaaagccgcaattcaagcgaaggccggtgccgagcgggaggcaactggagtggtcaggcctgtggctaaaacgcgggctaaggctaaggccaaaacgggctcaaaaacagatgccgtcgccgagatgaaggctgtttcaaaaaacaaagtggtggcggagaccaaggaaggcgctctgagcgagcccaaaaccttaggtaaggccatgggagattttacaccaaaggcaggcaatgagagcaccagctctacatgtaaaaacgaagcaggtaccgatgcttggttttgggccggagaggaagcaacaatcaattcatggttttggaacggggaggaagccggtaacagtttttcaacaaagaacgacaaacctgagattggtgcgcaggtctgtgccgaggagctggaacctgccgctggcgctgattgcaaaccaagatccggggctgaagaggaggaggaggagaacgtgataggcaactggttttgggaaggcgatgacacctcttttgatcctaatcccaagccagtgagtagaatcgtgaagccgcaacccgtgtatgagattaatgagaagaatcgtccaaaagattggtcagaggtcaccatatggccgaatgccccagcagtgactcctgcggtattaggattccgaagccaggctccaagcgaggcaagccctccatcttatatcgttcttgccagcgctgaagagaacgcctgttcattgccagtggctactgcttgtagaccctcaaggaacacaaggagctgttctcagccaatccccgaatgcagatttgactcggatccgtgcattcaaactatagatgaaattcgtagacaaattcgaatcagggaggtcaacggcatcaaaccgttcgcatgtccttgcaagatggaatgttacatggacagcgaggagttcgagaagttggtctcactgctgaagtccacaacagacccactgatacacaagattgcccgaatcgccatgggagtccataacgtgcacccttttgcccaagaattcatcaatgaagtgggagtagtcacactgattgagtcgctcttgtcatttccatcccccgagatgaggaagaagacagtgattaccctgaatcctcctagcggggacgagcgacagaggaaaattgaactgcacgtgaagcacatgtgtaaggaaacgatgagcttccctctcaacagcccgggtcagcagtcaggccttaagatattgggccagttaacaacagattttgtgcaccattacattgtggcgaactacttcagcgaattatttcatctcctgagctctgggaactgtaaaactagaaatctggtgctcaaactgctgttaaacatgtctgagaatcccactgccgctagggacatgatcaacatgaaagccctggccgcacttaaattgatcttcaatcagaaggaggccaaggccaatcttgtatccggtgtggccatattcattaacattaaggaacacatccggaaaggctcaatagttgtggtcgaccatctgtcttataataccctcatggctatatttagggaggtgaaggagatcatagaaactatgtag

SEQ ID NO: 30575 - DNA, 489 bp, synthetic construct
  source 1..489: mol_type = other DNA; note = Synthetic coding sequence
atgtcttataactgctgtagccggaatttttcctcgtgttctcacgggggatacctccactatcctggctcctcttgtggctcgtcataccctagtaacttggtttacagtacagacctatgtagcccttctacttgccagttaggtagttcactgtaccggggttgccaggagacatgttggcggccaaatagttgccaaaccttttgttactacccacggacccatatgttgtgcaacagttgccttactatgcatgtgggtagcagagggttcggctctaattcttgttgcagccttagctgtgggtcacgcagctgcagctctctgggatgcggttccaatgggttccgctacttgaactaccgcattcacaccagtccatctcagagttataggagcagattctgccaccccatctactttcctcccagaaggtggttccacagctcctgttaccaacctttttgtcgctctggcttctattag

SEQ ID NO: 30576 - DNA, 495 bp, synthetic construct
  source 1..495: mol_type = other DNA; note = Synthetic coding sequence
atgttcatctcattttatgactttaagaacatcccccaagatagtcgatgtgacgggcagctgttcattaacggccgaaataataagaacaactcaatctccctctacttccaggggggactgcggcacgctagcgcgtctataggcggaagcgaggcgtataggcatatgaaattcgagggcggtgtgcatcgcgtgcaacgagtccctaagacggaaaagcaggggagagtacacacatcgactatgactgtggcaatcctgccgcagccgaccgagataaatttagtgattaaccccaaagacttacgtatcgatacaaaacgagcaagcggcgctggtggccagcatgtcaatacaacggattcggccgtcaggatcgtgcaccttcccacaggtgtagttagcgaatgtcagcaggagcggtctcaattaaagaataaggaactcgcaatgaccaaattgagggccaaactgtatagcatgcatctgtag

SEQ ID NO: 30577 - DNA, 2166 bp, synthetic construct
  source 1..2166: mol_type = other DNA; note = Synthetic coding sequence
atggaagaggagctcaagtgtcccgtctgcgggtcactctttcgcgaacccattatcctgccctgctcgcataatgtctgccttccgtgtgcgcgtaccattgccgtgcaaacacctgacggaggatcagccgctggaggtctgggtggaggagccggaggcggaggtgaccatgccgataagttaagcctttacagcgaaactgactccggctacggaagctataccccaagcttaaaaagccccaatggggtaagagtactcccaatggtgcccgcacctcctggatctagtgccgctgcagctcgcggtgccgcatgcagtagcttaagcagctcatcatcttcgataacatgcccccaatgccatagatccgcctccctggatcacaggggccttagaggcttccagcggaacaggttactggaggccattgtgcagcgataccagcagggtcgcggagctgtccccggaacgagtgccgctgcagccgtcgccatctgccagctttgcgaccggaccccaccagagcccgctgcgacgctctgtgaacagtgcgatgtactttactgttctgcctgccagcttaagtgccatcccagtagggggccattcgcgaagcatagactgggagctcccagtggcggtggcggatgtaagagcccagggggagctggggcaggagcgaccggcggatctaccgccagaaaattccccacttgtccagagcatgaaatggagaactacagtatgtattgtgtctcctgtcggaccccagtgtgctatctctgcctcgaggagggtcgacatgccaaacacgaggtcaagcccttgggagccatgtggaagcagcataaggcccagctgtctcaggctcttaatggggtttccgacaaggccaaggaggccaaggagttccttgtgcagctcaaaaacatccttcaacagatacaggaaaacggactggattacgaagcttgtctggtcgcccaatgtgacgcgctcgtagacgctctaactaggcaaaaggcaaaattactgaccaaggtcaccaaggaacgcgaacataagctgaagatggtgtgggaccagatcaaccactgtacactcaagctcagacagagcactggtctgatggaatactgcctagaggttattaaagagaacgacccttccgggtttctgcaaatctcagatgcattgataaaacgcgtacaggtgagccaagaacagtgggtgaagggagcgctggagccaaaagtgtccgccgagttcgacctgacactcgacagtgaacccttactccaggcaatccaccaacttgactttattcaaatgaagtgcagggttcctcccgtgcctctgctgcagctggaaaagtgctgcaccaggaacaacagcgtaacactcgcttggcgcatgcccccttttacccatagcccggtggacggctatattctagagctagacgacggggcaggaggtcagttcagggaggtttacgttggaaaagagaccctgtgtacaattgacggtttacatttcaatagtacctacaacgccagagtgaaggcatttaactccagcggtgtcggcccatacagcaaaacagttgtgttacagacgagcgatgtcgcgtggtttaccttcgaccctaattcagggcatcgtgacataattctgtccaatgataatcaaaccgctacgtgctcttcttacgacgaccgggtcgtgctgggaaccgctgccttcagtaagggtgtacactattgggaattgcacgtggaccgttacgataatcatcccgatcccgcattcggagtggcgagagcaagcgtggttaaagatatgatgcttggcaaagatgataaagcctgggccatgtacgtcgacaacaatcggtcttggttcatgcactgcaactctcacaccaatcgcacagaggggggagtgtgtaagggggctactgtcggcgtcctgctggatcttaataagcacaccctcacatttttcattaatggccagcaacaagggccaaccgcattttcccatgttgatggcgtatttatgccagctctgtcactgaatagaaacgtccaggtaacgctccacaccgggctggaggttcccaccaacttgggtaggccgaaattgagtggaaactag

SEQ ID NO: 30578 - DNA, 1479 bp, synthetic construct
  source 1..1479: mol_type = other DNA; note = Synthetic coding sequence
atggattttctgctgggtaatcctttttcatctccagtaggccagaggatcgaaaaggccacagacggttccctgcaatcagaggattgggcccttaacatggagatttgcgatattatcaacgaaactgaggaaggacccaaggacgcacttcgggcagtaaaaaaaaggatcgtgggcaataaaaacttccacgaggtcatgctggctttgacagtcctggaaacttgcgttaaaaattgtgggcatcgctttcatgtgctcgtggcgtcccaagatttcgtcgagtccgtgcttgttaggaccatcctccccaagaataacccacctaccattgtgcacgacaaagtcctgaaccttattcaaagctgggccgatgcgttcaggtcctcccccgatttaactggcgtcgttactatttacgaggacctgagacggaagggacttgagttccctatgactgatttggacatgttgagcccaatccacactccacagagaactgtctttaacagcgagacacagtcaggccaggactcagtgggtacagacagttcccagcaggaggactccggtcagcatgccgcacctctccctgcccctcccattctgtcaggggacacccccatagcccctactcctgagcaaataggcaagttaagatccgagttggaaatggtgtctggcaatgtgagggtgatgagtgagatgctcactgagctggtgcccacccaagctgagcccgcagacctggagcttttgcaagaactgaaccgcacttgtagagccatgcaacagcgcgtgttggagcttattccgcaaattgccaacgagcaattgaccgaagagctgcttattgttaacgacaatttgaataatgtctttcttcgacatgagcgatttgaacgattccggacaggccagacgacaaaggcgccatccgaggctgagccagccgctgaccttatcgatatggggcctgatcccgcagctactggaaacttgagttctcaactggctggtatgaacctgggaagcagtagtgttcgtgccggactccagtcattagaggcttctggtcggttggaagatgagtttgatatgttcgctctaacgcgcggttcctctttggcagatcaaagaaaggaggtgaaatacgaggctccccaggcaacagacggactggcaggagccttggatgccaggcaacagtctaccggcgcaatccccgttactcaggcctgtctaatggaagatatcgagcagtggctttcgacggacgtcgggaacgatgccgaagagccgaagggcgtgacctctgaggagttcgacaaattcctggaggaacgcgctaaggccgctgataggttgcctaatctcagcagtccctctgcggagggaccgcctggtccgcctagcgggccagccccaagaaagaagactcaagagaaggatgacgatatgctgttcgcgctgtag

SEQ ID NO: 30579 - DNA, 747 bp, synthetic construct
  source 1..747: mol_type = other DNA; note = Synthetic coding sequence
atggccacatctgctccattgcgctcccttgaagaagaagttacctgttccatatgtctggactatctgagggaccccgtgacaatcgattgtggacatgtgttttgtaggtcttgtacaaccgatgtccgcccaatatcgggatctcgtccagtctgccctttatgtaaaaagcccttcaagaaagaaaacatcaggcctgtgtggcagctggcgtccttggtagaaaacatagaaagactcaaggtggacaaaggacgccaaccgggagaggtaactcgtgagcagcaggacgctaagctctgcgagaggcaccgcgagaagctgcattattactgtgaggatgacgggaagctgctatgtgtgatgtgccgcgagtccagagagcacaggcctcatactgccgttttgatggaaaaggccgctcagcctcaccgggaaaaaattctcaatcacttatctactcttaggcgggatcgcgataagatccaggggttccaggcaaagggggaagccgacattctggcagctttaaagaagctacaggaccagaggcaatacatagttgcagagttcgaacagggacatcagtttctgcgcgagcgcgaagagcatctcctcgagcaactggccaaacttgaacaagagctgacggaagggagggagaaatttaagagccgaggggtgggggagttggctcggctcgcccttgtgatttccgagctcgagggtaaagcacagcaatag

SEQ ID NO: 30580 - DNA, 21 bp, synthetic construct
  source 1..21: mol_type = other DNA; note = Synthetic coding sequence
atgtccaggaggcgtttctag

SEQ ID NO: 30581 - DNA, 165 bp, synthetic construct
  source 1..165: mol_type = other DNA; note = Synthetic coding sequence
atgagtgagcagggtgacctcaatcaagctatagccgaagaagggggaacggagcaggagacagctacccccgagaatgggatcgtgaagtctgagagtctcgacgaggaagagaagctcgagctccagcgccgattagaggcccagaaccaggaaaggcgctag

SEQ ID NO: 30582 - DNA, 1446 bp, synthetic construct
  source 1..1446: mol_type = other DNA; note = Synthetic coding sequence
atggcctccgcagcttctgtcacatcactggccgacgaggtcaactgtccaatttgccaggggacactccgggagccagtgaccattgactgtggacataatttctgtagggcgtgtctcacgcggtactgtgaaattcctggccctgacttagaggaatctcccacctgtcctctgtgcaaagagcctttccggcctgggtctttccgcccaaattggcagcttgcaaacgtagtggagaacattgagcggctgcaactggtcagcactctgggactgggcgaagaagatgtgtgccaggagcatggcgagaagatttattttttttgtgaagacgatgaaatgcagctctgcgttgtgtgccgggaagctggcgagcacgccacacacaccatgcggttcttggaggatgcagccgcaccctatcgagagcagattcataagtgcctgaagtgcctgcggaaagagcgcgaggaaattcaagagattcagagcagggagaataagagaatgcaggtgctgcttacccaggtctccaccaaaagacaacaagtcattagcgagttcgctcatctccggaagttcttagaagaacaacagtctattttactcgcccaattagagtcgcaggatggggatattctgaggcagagagacgagtttgaccttctggtggccggagaaatatgtagattttctgcactgatagaagaactcgaagagaagaacgaaagacccgcacgcgaactacttacagatatacgcagtacactgatcaggtgcgagaccaggaagtgccgaaagcccgtggcagtgagccccgaactgggccaacggataagggacttcccccagcaggcccttcctctgcaacgtgaaatgaagatgttcctagagaagctctgtttcgaattggattacgaacctgcccacatctcgcttgatcctcaaacctcccacccgaaactgctcctcagtgaggaccaccagcgggctcagttttcctataaatggcagaatagcccagataatccacaaagattcgaccgggcaacatgtgtcctggctcacacaggaattacaggcggaaggcacacatgggtcgtcagcatcgatctcgcacacgggggaagctgtaccgtgggagtagtatctgaggacgttcaaaggaaaggagagcttcgtctcaggccagaggaaggggtgtgggccgttcggctagcctggggatttgtatccgcgttggggtccttcccaacacgcctcactctcaaagaacagccgagacaggtgcgagtttccctcgattacgaagtaggctgggttaccttcaccaatgccgtcacacgtgagcctatctatactttcacagcttcttttacccggaaagttatacccttcttcgggctgtggggacggggttcttcatttagcctgtccagctag

SEQ ID NO: 30583 - DNA, 312 bp, synthetic construct
  source 1..312: mol_type = other DNA; note = Synthetic coding sequence
atgggacagcagtcttcagttagacgccttaagaggagcgtgccttgcgagagtaacgaagccaacgaagccaacgaggcaaataaaaccatgcctgaaaccccaacaggagatagcgaccctcagccagctcctaagaagatgaaaactagtgagtctagcaccatccttgtcgtacgttataggaggaatgtgaagcggacctcccccgaggaactcgtgaatgaccacgcaagggagaacagaatcaatccggaccagatggaagaggaggaattcatcgagatcacgactgagaggcccaagaagtag

SEQ ID NO: 30584 - DNA, 2919 bp, synthetic construct
  source 1..2919: mol_type = other DNA; note = Synthetic coding sequence
atggagcgtatgaactggctgtcacgtctggcttccagggggccaggccataggataccccaaggcgcaaatttgcagactcccgtcatggctgacccagagacttgcctgatggtattcaaaaaccattggtcccaggtggtacgaatcttggagagacagggcccacgcgcagcacccggaggcgcagatgaccttagtgctgttcggaatcacacataccaaatgttaactctactggctgaagatagagccgtgccctccgctcccaccggtcccggaccactgcttgagttcgcattacatgaggatctccttaccagggtgctcacgtggcagcttcagtgggacgagctgggcgacggcgtggaagaaagacgagccgagcagctaaaactgttcgaaatgcttgtgtctgaagctagacagccccttctgcgtcacggccctgtgcgggaggccttgctgacattacttgatgcttgcggcagacccgtgccttcgtcacccgctctggacgaaggactagtgctgctcctatcacagctgtgcgtgtgcgtggcccaggaaccgtccctcctggagttcttccttcaacctcctccagagcccggagccgctcctagactgctcctattcagcaggctcgtgccgttcgtgcaccgggaaggcactctcggacagcaggcaagagacgccctcctgcttctcatggcactatcagcaggatctcccaccgtcggacgctatattgctgatcacagttatttctgtcctgtgctggccactgggcttagtgctctgtactctagtctgccgcgaaagatcgaagttcctggtgatgattggcattgcctacgaagggaggattggctgggcgttcccgcattagctctgtttatgtcgtccctggaattctgcaatgccgtcatacaggtggcacatcccctggtccagaagcagttagtggactacatccataacggatttctggtgcccgtaatggggcctgctctgcacaagacctccgttgaagaaatgattgcatccaccgcctacctggaactgttccttaggtctatctcagagccagctctgcttcgtacattccttagattcctcctgctgcatagacacgacacccatacaatcttagacactctggtagcgcgtattgggagcaacagcagactgtgtatggtgtccctgtccttgttccggactcttctcaatctgagctgcgaggatgtcctcctacaactggtgctccggtatctcgtgccctgtaaccatgtaatgttaagccagaagccagctgtacgggatgttgacctttacggaagggccgcagacaaattcctctctttgatccctcgttgttgtagacaccacgccccaagtcctccacgccctgaacatgccagctgggctcgcggaccaggctctccttcagtggattcatctagtgttaccaccgtgccgagaccgagtacgccctcccgcctcgccctttttcttcgccagcagtctctgggtggcagcgaatcgcctggacccgcaccctgtagcccagggctgagtgcaagtccagccagctcaccaggacggaggccaacccccgcagaagaacctggagagctggaggacaattacttggaatacctgcgcgaggctagacgaggcgtggatcgatgtgtaagggcctgtcgaacatggagcgcaccatacgatggtgagagaccgtcccccgaacctagtcccttcggaagcagaaccaagaaaagatctcttctgcctgaagaggatagaaacaacgtcggcgaaggcgaagaggaagaactcggcagaagaggccgtgcaggtggcgcaggggagggaccaggacatctacctcccccacagctaaacggtgtgcctggaagctggcccgagggagcaaaaaaggtgaggctcgttcctaaggagggcgctggggagctcctggaaggtatcagtgaaggcatggccggtctcgagggattcgggcaagaattgagggaattggaggtggcactcagcaatggcggtacaggatcagagagtcccttggagcctccactgccactcgaggaagaggaggcttatgagtctttcacctgcccacccgagccccctggcccatttttatccagcccattacgtacactgaatcagttgccatcgcagccattcaccgggcctttcatggcggtactgttcgccaaactggaaaacatgctacagaacagcgtgtatgtaaattttctgctgaccggccttgtggcacagctggcatgtcacccccagccactactacggtccttcctgctgaacaccaatatggttttccaaccctctgtcaaatctctcctacaggtgctggggagcgttaagaacaagattgaaaactttgctgcttctcaggaagacttcccagccctcctgagcaaggctaaaaagtacctgattgccagaggcaaacttgactgggccgaaggcccagctgctggccctgcacccagacgcagcgacccgctcgtcaaaagccgacgaccatccctgggagaactactcttgagacatgcacatagtccgacccgggctcgtcaggccgcacaactcgtcctgcaaccaggaagggatggcgcaggcctgggcctgagcggtggcagcccaggagcaagcacccccgtactattgactaggggcggagccccagagcgccagggagaggcgctgcgtgtgaaaaacgccgtctattgcgctgtcattttccctgagtttcttaaggaactggctgcaatcagccaagcacatgctgttacctcccctttcctcctagaaactagcgaggaaggtagcgggcctttgatcagcggctgcggacctctgaatccttag

SEQ ID NO: 30585 - DNA, 1929 bp, synthetic construct
  source 1..1929: mol_type = other DNA; note = Synthetic coding sequence
atgaagatcttttgctccagggccaacccaactactggaagcgtggagtggttagaggaggacgaacattacgattatcatcaagagatagccagatcctcttatgccgacatgctgcacgataaggatagagttttcaagcccatggctgatgctgctgtgaaaattgtggagaaaaacggattctctgataaaatcaaagtgatcaataaacacagcacagaggtgaccgtgggcccagagggcgatatgccgtgcagggcaaatatcctagtgacagaactgttcgacactgaacttattggcgaaggagctctgccgagttatgaacacgcacataggcatctcgtggaggaaaattgtgaggctgtgcctcaccgcgcaacggtgtatgcacagctagtagagagcggccgtatgtggagctggaacaaactgtttcctatccacgtgcaaacatccctgggcgaacaagtcatcgtgccccctgtagacgttgagagctgccccggagcaccctccgtgtgtgatatccagctcaaccaagtgtcccctgctgactttactgtcttatccgatgtgcttcccatgtttagtattgacttttccaagcaggtgtcatcctctgcggcatgtcatagcagaagattcgagcccctgaccagtgggagggcccaagtagtattaagttggtgggatatcgagatggaccccgaagggaaaataaaatgcactatggccccattttgggcccactcagacccagaagagatgcagtggcgcgaccactggatgcaatgcgtgtactttttacctcaggaagaaccagttgtgcaggggtcagcactttacctggtcgcccaccacgatgactactgcgtttggtattctcttcagaggacctccccagagaaaaatgagcgggtgcgccagatgaggccggtgtgtgattgccaagcacacttgttgtggaatcgcccaagattcggcgagattaacgatcaggaccgtaccgacagatatgtccaggcactgcgtaccgtcctcaagcctgactctgtgtgtctgtgcgtgagcgatgggtcgctactgagcgtgcttgcccaccacctcggcgtggagcaagtctttactgtagaaagctccgccgctagccataagttactcagaaagatttttaaggctaatcacctggaggacaagatcaacatcatcgaaaagagaccagagctcttgacgaatgaggacctgcagggccgtaaagtaagcctgctgttaggcgagcctttcttcactacatctcttctgccatggcacaacctctacttctggtacgtccgtaccgcggttgatcaacacctgggaccaggagcgatggttatgccgcaggcagccagtctccacgcggttgtggtcgagttccgggatctgtggaggattcgaagcccatgtggggattgtgaggggtttgatgtgcacattatggacgacatgattaaacgtgcactcgatttcagagaaagccgggaggccgagccacaccccctctgggagtatccttgtagatccctgtctgaaccttggcagattctaacgtttgattttcaacagcccgtgccgctacagcctctgtgtgctgaaggcaccgtggagctccgacgcccaggccagtctcacgccgctgtcctgtggatggaatatcaccttaccccagaatgtactctttcaacgggactgctggaacccgcagatcctgaaggtggctgctgttggaatcctcactgtaaacaggctgtgtatttcttcagtcctgcccctgaccccagggcattgctgggagggcctagaacagtatcatatgcggttgaatttcatccagacacaggcgacattatcatggagttcagacatgctgacactcccgactag

SEQ ID NO: 30586 - DNA, 1935 bp, synthetic construct
  source 1..1935: mol_type = other DNA; note = Synthetic coding sequence
atgagtgtgacccttacatccgtaaaacgggtccaatcctctccaaatctcctggccgcagggagagactcgcagtcaccagattctgcctggcgcagctacaacgacggcaaccaggagaccttaaacggtgacgctacctatagctcactggccgcaaagggatttcgctcagtccgccctaatctccaggacaaacgaagtccaacccagtcccagatcacagttaatggaaattccggtggtgctgtgagcccgatgtcttactatcaaaggccattctctccctccgcatattccctgccagcctcattgaactcatcgattgtgatgcagcacggcacaagcctcgattctacagatacctacccacaacatgcacaatctctcgacggcaccactagctcctcaatacctctgtacaggtcaagcgaagaggagaagcgtgtcacggtcatcaaggcaccgcattatccaggaattggccctgtggacgagtctggaatccctacagcaattcggacgacggtcgaccgcccaaaggactggtacaagactatgttcaaacagatacatatggtacacaaaccaggtctctacaatccaccatacagcgcccagtctcatcctgcggcaaaaacgcagacctacaggcctttgtcgaagtctcattccgataactctcccaatgcgttcaaagacgcctcatctccagtgccgcctcctcacgtgccgcctccagtgccccctctcagaccaagggatagatcatccaccgagaaacacgattgggacccaccggacagaaaagtcgacaccagaaagttccggtccgaaccccgttcaattttcgaatacgaaccaggtaagtctagtatcttacagcatgagcggccagcatcactgtaccaatctagcatagataggtccctggaacgaccaatgtcaagtgcaagcatggcgtcagacttcaggaaaaggcgcaaatcagagcctgccgtggggccaccgaggggactgggcgaccagtctgcctctcgaacatctccaggtagagttgatctgcccggaagctccacaaccttgaccaaatccttcacctcttccagtcccagctcaccaagtagggcaaaagaccgggaatcaccacggagctactctagcacactgaccgacatgggcaggtccgctccgcgagagcggagaggcaccccagagaaggaaaagttacctgccaaggccgtgtatgacttcaaggcgcagacatccaaggagctgagctttaagaagggtgacacagtttacatactgcgcaaaattgatcagaattggtacgaaggggagcaccacggcagggtgggtatctttcctatatcctatgtggagaagctgactcctcccgagaaagctcagcccgctagacccccaccaccagcccagcctggagaaattggagaggctattgctaagtacaacttcaacgccgatacaaatgtcgaactgagtctgagaaagggagatcgtgtaattctgctgaagcgagtcgaccaaaattggtacgagggcaagattcctggaaccaacaggcagggaatcttcccagtatcttatgtggaggtagtcaagaaaaataccaagggagcagaagactacccagacccacctattccccatagctacagctccgatcggatccacagcttgagttccaataagccacaaagacccgtcttcacacatgagaatatccagggtggcggtgaacctttccaagccctgtataattacaccccacgcaatgaagatgaattggaattacgcgaaagtgatgttatcgacgttatggaaaagtgtgacgatgggtggttcgtgggcaccagtcggagaactaaatttttcggcacttttcctggtaactacgtgaaacggctgtag

SEQ ID NO: 30587 - DNA, 294 bp, synthetic construct
  source 1..294: mol_type = other DNA; note = Synthetic coding sequence
atgggcaaaagctgcaaagtggtggtctgtgggcaggcaagcgtgggaaaaacctcaatactggagcagctgctctacggtaatcatgttgtgggttcagagatgatcgagacccaggaggacatatacgtgggctccatcgagaccgatcgtggcgttcgtgagcaaatcgctgaatctttgttctccgtatggtcatgttctagaagacggcttacaaacccaagaactcgccgacggtccccgtcatggtctctcgccacatctgttacataccgatcctctggtgtgtag

SEQ ID NO: 30588 - DNA, 915 bp, synthetic construct
  source 1..915: mol_type = other DNA; note = Synthetic coding sequence
atgagcaagacccatgaccaccagctggagtcttctctgtctccagttgaggtgttcgccaagacttctgcctccttagagatgaatcagggagtgagcgaagagagaattcatctcggcagctcccctaaaaagggcggaaattgcgacctgtcccaccaggagaggctccagtccaagtccttgcatctgagtccccaagagcaaagcgcttcttaccaggatcgccgtcaaagctggagaagagcctccatgaaggagaccaaccgaagaaagtctctgcaccctattcaccaaggaatcacagaactgtcccgctctatctctgtggacttagcagaaagcaaaagactcgggtgccttttgctgtcaagtttccagtttagcattcaaaagctcgagccctttcttagagatactaagggcttctccctggagagcttccgcgctaaagcgtcctcattgagtgaagaactgaagcactttgccgacggactagaaactgatggcaccctccagaagtgcttcgaggacagtaatgggaaggcatccgatttttcgctggaggcgagcgttgccgaaatgaaagagtacataactaaatttagcctggagcgacagacctgggaccaactcctactccactatcagcaggaggccaaggaaatcctgtcccgtggctctaccgaagcaaagattacagaagttaaagtggaaccaatgacttatctcggcagttcccagaatgaggttctgaacacaaaacctgactatcagaagatcctgcagaaccagtctaaagtgtttgactgtatggagcttgtcatggacgagctccaagggagtgtcaaacagctgcaggccttcatggatgagagcacccagtgcttccagaaagtgagtgtccagttgtag

SEQ ID NO: 30589 - DNA, 1842 bp, synthetic construct
  source 1..1842: mol_type = other DNA; note = Synthetic coding sequence
atggctactattccggactggaaattacagcttctcgctagaagaagacaggaggaggcttcagtgcggggtagggaaaaggccgagcgagagcgactctcccagatgcccgcatggaagcgtggtctcttagagcgacggagggctaaattgggtttgagccctggggagccaagccctgtgctcggaaccgtggaagccggacccccagacccagatgagtctgcagtcctgctggaggctatcgggccagtgcaccagaatcgcttcatccggcaggagagacagcagcagcagcagcaacagcagagatcagaagagctcctagccgagcggaaacctgggcctctcgaagccagggagcggagaccaagtccaggtgaaatgcgcgaccagagccccaaaggcagagaatcacgcgaggagaggttatctccccgagagacaagggagcgcagactagggattggcggagcccaggagttatcattgagaccactcgaggctcgtgactggcgtcagagcccgggtgaagttggtgatcggtcttcgaggctgtccgaggcctggaagtggcgcctgagtcctggggagacccccgagcgctcactgaggctcgcagagtcacgcgaacagagtccccgacggaaggaagttgagtcgaggctctctccaggggaaagcgcctaccaaaagctgggactgaccgaggctcataaatggcgacccgattccagggagtcacaggagcagagcctggttcagctggaagccacagaatggcgattgcgctctggcgaggaacggcaggactatagcgaagagtgcggaagaaaagaagagtggcccgtgcccggtgtagcgcctaaggaaacggcggagttgagcgaaactctgaccagagaggctcaggggaactcatctgccggtgtggaagccgctgagcaaagacctgttgaagacggggagaggggaatgaaacccacagagggttggaagtggacactgaactcgggaaaggctcgggaatggacacctagggatattgaggcccagacccagaagcctgaacccccagagtcggcagaaaagctgttagagtcccccggtgtggaggctggtgagggagaagccgagaaagaagaagctggcgctcaggggcgaccccttcgtgcgctgcagaattgttgttcggtgccaagtcctctaccccctgaggacgctggaaccggcggattgagacagcaggaggaggaagctgtagagttgcaaccccctcctccggcacccctctctccaccccctcctgcccctacagccccacagccccctggcgatcctctgatgagccggctgttctatggggtgaaagcgggacctggtgtgggcgcacccagacgtagcggacatacgtttactgtaaacccgagacgttccgttccaccagcaaccccagcgacccccacatctccggcaaccgtcgatgcagccgtgcctggggctggtaagaagcggtaccctacggctgaggagatcctcgtgctgggcggatacctgaggctgagcagatcatgcctggctaagggttcaccggagagacaccataaacagctgaaaatatcgttctcagagacagcattagagacaacctatcagtatccttcggagtcctctgtgcttgaagaattgggtcctgagcctgaggtacctagcgcgcctaaccctccggctgcgcaacccgacgacgaggaggacgaggaagagctgctgctgctccagcctgagctgcaggggggattaagaaccaaggccctgatagttgacgaatcctgtcgtagatag

SEQ ID NO: 30590 - DNA, 1560 bp, synthetic construct
  source 1..1560: mol_type = other DNA; note = Synthetic coding sequence
atggaaggtgtcctttataaatggacgaattatctgtccggatggcaacctcgctggtttttgctctgcggaggaattctgtcatactatgactcccctgaagacgcctggaagggctgtaaaggaagtattcagatggcggtttgtgagatccaggtccattctgtggataacaccaggatggacctgattattccgggagagcagtacttttacctcaaggcaaggagtgtggcagagaggcaaagatggttagtggcactgggctccgccaaagcatgcctgactgattctcgcacacaaaaggaaaaggagttcgccgaaaacacagaaaacctgaagaccaaaatgtctgagcttcgcctctattgcgacctcctggttcaacaagtcgataagaccaaggaagtcaccacaacaggtgtgtcaaactccgaagagggtatcgacgtaggcaccctgctcaagtctacatgcaatacctttctgaaaacactggaagagtgtatgcagattgcaaatgccgcatttacctccgaactgctgtatagaacccctcctggtagcccccagcttgctatgctcaaaagtagtaaaatgaaacatccaattattcctatacacaattcgttagagaggcagatggagctatcgacctgcgagaacggatctctgaacatggagataaacggagaagaggagatcctgatgaaaaacaaaaatagtttgtatctgaaatccgccgagatcgactgtagtatcagcagtgaggaaaacactgacgacaacataacagtgcagggtgaaataaggaaagaggatggcatggagaacctaaagaatcacgataataatcttactcagagtgggtccgactcttcatgctctccagagtgcttatgggaggagggtaaggaggtcattcccacctttttttccacaatgaacacttccttctccgatatagagctgctggaggatagtggcatcccaacagaggcttttctggcaagctgctacgccgtcgttccagtgctggataagttgggccctacagtgtttgctccagtgaaaatggacctcgtcgggaacattaagaaggtgaatcagaaatatatcaccaataaagaagaattcaccaccctacagaaaattgtcctgcatgaggttgaagctgacgtggctcaggtccggaatagcgctaccgaggccctcttatggctgaaacggggactgaagtttctaaaaggtttcctcactgaggtgaaaaacggggagaaggatatacaaacagcactcaacaatgcgtacgggaagacactgcgacagcaccacgggtgggtggtacgaggggtgtttgccctggccctcagagccgctccgtcctatgaggacttcgtggccgctctcacagtcaaagagggagatcatcaaaaagaagcattttcaatcggcatgcaacgcgatttgtcgctttacttgcccgctatggagaaacagctggcaatcttggataccctgtacgaggtgcacgggctggaatcggacgaggtggtgtag

SEQ ID NO: 30591 - DNA, 1446 bp, synthetic construct
  source 1..1446: mol_type = other DNA; note = Synthetic coding sequence
atggccagcgccgcttctgtgacttctctcgcagatgaggttaattgtcccatttgtcagggcaccctgagggagccggttacaattgattgcgggcacaatttttgccgggcatgcctcacgaggtactgcgagatccccggaccagatctcgaggaatcgcctacttgccctctgtgcaaggagccatttcggccaggaagctttaggcctaactggcagcttgccaatgtggtagagaacatcgaacgactacagctggtgtccaccttagggctgggtgaggaggacgtgtgccaagaacatggcgagaagatatactttttctgtgaagatgacgagatgcagctttgtgtcgtctgtcgtgaggcgggagaacacgcaacccataccatgcgctttttggaggatgcagccgctccctatcgtgagcagatccacaagtgcctgaagtgcttaagaaaggaaagagaggagatccaagagattcagagcagggaaaataagcgcatgcaagtgctcctcactcaggtgtctactaaaaggcagcaagttatctctgagttcgcacacctcagaaaatttctcgaagagcagcagagcattttgctagcccagctagagagtcaggatggggatattttgcgccagagggacgagttcgatctcctggtggctggtgagatttgcagattttcagctttgatcgaagagttggaggaaaagaatgagcgccctgcccgagaattattaacggatatccggagcaccttaattaggtgtgaaacaaggaagtgtcgaaagcccgtggcggttagcccggaactggggcaacggatccgtgacttcccgcagcaggcactgcccctgcagagggagatgaagatgttcctcgaaaagctgtgcttcgagcttgactatgagcccgctcatatctcgctcgatccacagacttctcatcctaaactgctgttatctgaggatcatcagcgggctcagttctcctataaatggcagaattcccccgataatcctcaacgattcgaccgtgccacctgcgtcctggcacacacagggatcaccgggggacgacacacttgggtggtgtctatcgacctggcacacggaggaagctgtacagtgggggtagtgagtgaggatgtgcagcgaaagggcgaattgcgactccgacccgaagaaggtgtctgggcagtgcgactcgcctgggggttcgtgtctgcactcggaagtttcccaactaggttgacattgaaggagcagcccaggcaggtgcgggtgagcttggactacgaggtgggttgggtgacctttacaaatgccgttacaagagagccaatctatactttcacggccagcttcactcgcaaggtcatccccttcttcggattatggggtcggggtagctccttcagtttgtcaagctag

SEQ ID NO: 30592 - DNA, 1173 bp, synthetic construct
  source 1..1173: mol_type = other DNA; note = Synthetic coding sequence
atgtctgccgcaaatcccgagacacctaatagtaccattagtcgcgaagccagcacccagagttcctcagctgccgctagtcagggttgggtgttgcccgagggaaaaattgtcccaaacactgtgtttgtgggtggcatagatgcacgaatggacgagaccgagatcggatcttgcttcggaaggtatggctccgttaaggaggtgaaaatcatcaccaacagaaccggagtgagcaaggggtacggctttgttagcttcgtgaatgatgtcgatgtgcagaaaattgtcggttcacagattcacttccacggcaagaagctcaaattaggccctgcaatcaggaagcaaaaactctgcgcacgccacgttcagccccgaccattggtcgtcaacccaccgcctcctcctcagttccagaacgtttggcgcaatcccaacaccgaaacttatctgcagccacagattacaccaaatcccgtcactcagcatgtgcaggcttatagcgcgtacccccactcccctggtcaggtgattactggttgtcaattgctagtatacaactaccaggaatatcccacatatccagatagcgctttccaagtaaccaccggttaccagctccccgtatacaattaccaacccttccccgcttatcccaggtcaccgtttcaggtaacggcaggctatcagttgccagtgtacaattaccaggcctttccggcttacccaaactctccctttcaagtagcaactggttaccagtttcctgtgtataactatcagccattccccgcttacccaagtagcccattccaggtcaccgcaggttatcagctgcccgtctataactatcaggccttcccagcctacccaaattccccctttcaggtggctaccggatatcagttccctgtgtacaactaccaggccttccccgcttaccctaacagcccggtacaggtgacgactgggtaccagctcccggtctacaattatcaggcttttccagcctatcccaactcagcagttcaagtgacaactggataccaatttcatgtttataactaccagatgccccctcagtgcccagtcggagaacaaagacggaacctctggacagaggcgtacaagtggtggtacctggtttgtcttattcagcgtcgcgattag

SEQ ID NO: 30593 - DNA, 1143 bp, synthetic construct
  source 1..1143: mol_type = other DNA; note = Synthetic coding sequence
atggaaaaaaaaaagatggtgacccagggaaaccaagagcctacaactacccctgacgcgatggtccagccatttaccaccattccattcccccctccgcctcagaacggcattccaacagaatatggggtgcctcacacacaagattatgccggacagacaggagagcacaatcttacactctacgggtcgactcaggcccacggagaacaatcctctaattcacctagtacgcagaatggctcactgacaacagaggggggtgcgcagactgacggccaacaatcgcagacccagagctcagagaacagcgagtctaaatcaactcccaaaaggctgcacgtctccaatataccgtttcgattccgggatccggacctgaggcaaatgtttggtcagtttggcaagattctggatgtagagatcattttcaacgaaaggggcagcaaggggttcggctttgtgaccttcgaaaacagtgccgatgctgatagagcaagggagaaactccacgggaccgtggtggagggcagaaaaatagaggtcaacaatgccaccgcgagagttatgactaataaaaaaatggttacaccttatgccaacggctggaagttgtccccagtggtgggcgctgtatatggcccagaactatatgcagccagtagctttcaggccgacgtaagcttaggcaacgacgcagctgtgccacttagcggaagaggcggaattaatacttatatccccctgatttctctgcccctcgtccccggttttccataccccacagccgctaccactgccgctgcatttaggggagcgcacttgcggggacgaggaagaacagtgtacggcgctgtacgcgctgtgccaccaaccgctatcccagcgtaccctggcgtagtctatcaagacggattttacggcgcagatttatatggaggttacgcggcttataggtacgcacagcctgccactgctactgcagcaacagcagccgctgccgcagccgctgcctacagtgacggctacggtcgagtctacactgccgatccctatcatgccttggccccagctgcgtcatatggcgtcggtgcagttgcttcattgtaccgcggaggctactctcggttcgcaccttactag

SEQ ID NO: 30594 - DNA, 1614 bp, synthetic construct
  source 1..1614: mol_type = other DNA; note = Synthetic coding sequence
atggaccctggagacgccgcaattctggagagctctctgcgcatcctttaccggttattcgagtccgttctcccccctctccccgcagcgctgcagagtcgtatgaatgtaatcgaccatgttcgcgacatggctgcggcaggcctgcattcgaacgtgcgcctattgtctagtctgctcctaactatgagcaataataaccccgagctgttctcgccccctcagaaataccagctgctcgtatatcatgctgacagtctgtttcatgacaaggaataccgaaatgcagtttccaagtacaccatggccttgcagcaaaagaaagccctgtcgaaaaccagcaaggtgaggccatccactggcaattctgcctctaccccacagagtcagtgtttgccgtctgagatagaagttaagtataagatggctgaatgttacactatgctgaagcaggataaagacgcgatcgctattttggacggaattcccagccgccaacgaacacctaagattaatatgatgttagccaatctctataaaaaggctggtcaggagagaccctccgtgaccagctacaaagaagtgctccgccagtgtcccttggctctggacgccattctgggcctgctgagcctgtcagtgaagggcgcagaggttgcatccatgacgatgaacgtgattcaaacggtgcctaacctagactggctctccgtatggattaaagcgtatgccttcgttcacacaggcgacaatagccgagcaatcagtaccatctgtagtttagaaaagaaatctctgctacgcgacaacgttgatctactggggagtctggccgatctgtattttagggccggagataacaagaatagtgtgctgaagttcgagcaggcacagatgctcgacccttacctgatcaaggggatggatgtgtacggatacctgctggctagggagggtcgccttgaggatgtggagaacctaggatgccgtctcttcaacatttccgatcagcatgcggagccttgggtggtcagcggttgccactcgttttacagcaaacgctactctagagccctgtatctgggggctaaggccattcagctgaattctaacagcgttcaggccctgctgctgaagggcgctgccctgcgtaacatgggcagggtacaggaggctataattcacttcagggaagccatccgcttagctccatgtaggctcgactgttatgagggactcatcgagtgttacctcgcttccaatagcatcagggaagcaatggtgatggctaataatgtgtacaagactcttggggcaaatgcacagacactcaccttgctcgccaccgtgtgtttagaggatcctgtcacgcaggagaaggccaagaccctactagacaaggccctgacgcaacggccagattatataaaggcagtagttaagaaagctgagttactgagcagagagcagaagtacgaggacggcatcgcactgctccgcaacgcactcgccaatcagtcagattgtgtgctgcatcgaatattgggcgattttctggtggctgtgaacgagtatcaggaggccatggaccagtattcaattgctctgcgatag

SEQ ID NO: 30595 - DNA, 351 bp, synthetic construct
  source 1..351: mol_type = other DNA; note = Synthetic coding sequence
atggcattcatgactaggaaactctgggacctggagcagcaagtcaaggctcagacggacgagatcctgtccaaagatcaaaagatcgctgcattagaggatctggttcaaacccttaggccccaccctgcggaagctacgttgcagcggcaggaagaactggaaactatgtgcgtgcaactccagaggcaggtccgcgagatggaacgctttctttctgactacggacttcagtgggtgggcgaacctatggatcaagaagattcagagtccaagactgtctccgagcacggcgaaagagattggatgactgcaaagaaattctggaaaccgggacgggcaggcaggtag

SEQ ID NO: 30596 - DNA, 285 bp, synthetic construct
  source 1..285: mol_type = other DNA; note = Synthetic coding sequence
atgaccggaagcagaaactggcgggcaacccgtgacatgtgcaggtataggcacaattatcctgaccttgtcgagcgcgattgtaatggagatacacctaatctctctttctatcggaatgagatccgttttctgcccaacggctgcttcatcgaggacatactccagaattggaccgacaactatgacctgctagaggataaccattcctacatacaatggttgtttcccttgcgcgaacccggagtgaactggcatgctaagcccctgacactgcgagagtag

SEQ ID NO: 30597 - DNA, 1029 bp, synthetic construct
  source 1..1029: mol_type = other DNA; note = Synthetic coding sequence
atgcgattctgggccccttggggatctaggactccaagtggacggagtctgtggacggacccggtgacgtattatactgcccttcacatcgccgtccttagaaaccaacccgatatggtagaactgctggttcaccacggcgctgatgtgaatcggagagacagaatccatgagtcctcccctctggatctcgcctctgaagagccagagcgattaccttgcctgcagaggctgctggatcttggggcagatgtgaacgccgctgacaaacatggtaagactgcactcctgcacgccctagcctcctctgacggcgtgcagattcacaatacagagaatatacgcctgctactcgaaggaggcgcagatgtaaaagccacaacaaaggacggtgacactgtcttcacctgtataattttcctactgggagagacagtgggcggagacaaagaggaggcccagatgattaaccgtttttgcttccaggtgaccaggctcttgctagctcacggcgctgacccaagcgaatgccctgcgcatgagtctctcactcacatttgtctcaaaagctttaagctgcacttccctttattgaggttcttattagaaagcggcgctgcgtataactgctccctgcacggagcgagttgttggtctggattccacataattttcgaacggttgtgctcccatccaggctgtacagaagatgagtcgcacgcagacctgctgcggaaggcagaaaccgtcctcgacctcatggtgacaaacagtcagaagttacagctccccgagaatttcgatattcatccggtcggaagcctcgccgaaaaaattcaggctctacacttcagcctgagacagctagagagttatcctcccccactcaagcacctgtgccgcgtagccatcagattgtatctccagccatggcctgtcgacgtgaaggtgaaggcattgcctctccctgacagactgaagtggtatcttctgagcgagcacagcggatcagttgaggacgatatttag

SEQ ID NO: 30598 - DNA, 3192 bp, synthetic construct
  source 1..3192: mol_type = other DNA; note = Synthetic coding sequence
atgccacatctgccactggcttcttttcgaccccctttctggggcctcagacatagccggggtctgcctcgcttccactcagtctcaacccaatctgagcctcacgggtctcccatttcccgacggaacagggaagccaagcagaagagacttagagaaaagcaggccacgttggaggccgagattgctggcgagtcgaaaagcccggcagaatccatcaaagcatggagaccgaaggaactcgtcttgtacgaaatccctactaagccgggtgaaaagaaggatgtgtcaggcccacttccacctgcctattcacctcggtatgtggaagccgcttggtacccttggtgggtcagggagggtttcttcaagccagaatatcaagcacgccttccacaggccaccggggaaacattctccatgtgtattccaccgccaaatgtgactggcagtttgcacattggccacgccctgacggtcgctatccaagacgcactggtccgttggcacaggatgaggggcgatcaagttctctgggtgcccggtagtgaccacgccggaattgccacgcaggctgtggtggaaaagcaattgtggaaggaacgcggagtaagaagacatgagctgtcacgcgaggcctttctgagggaggtctggcagtggaaagaagcgaaagggggagagatttgcgagcagctgcgtgccctaggcgcttccctcgactgggaccgtgaatgcttcaccatggacgtgggaagctccgtagccgtgacagaagcttttgttaggctctataaggcgggactgttatatcgcaaccaccagctggtgaattggagttgtgcgctgagaagtgcaataagtgatattgaagtggagaaccgcccactgcctggccacacacagcttcggctccctggttgtcctacacccgtgagctttgggctgctgttcagcgtggcgtttcctgtggacggagagccggacgctgaagtagtggtgggtacaaccagacctgaaactctacccggagacgtggcggtggcagtgcatccagatgacagccgttacactcacctccacggacgtcagctgaggcatcccctcatgggccagccattgccattaattacagattatgctgtgcagccgcacgtggggacgggggctgttaaggtgactcctgcacactctcccgcagatgcggagatgggtgctaggcacggattgtctcctctgaacgtaattgctgaagacggaactatgacttctctttgtggagactggttacagggactgcacagatttgtggctcgcgagaaaatcatgtctgtgctgtcagagagaggtctgtttagaggcttgcagaaccatcccatggtgctgccaatatgctctaggtcaggtgatgtgatcgaatacctgctcaagaatcaatggttcgtacgctgccaggaaatgggtgctcgggcagcaaaagccgtggagtctggcgctttagaactcagcccctcctttcaccagaagaactggcagcactggttttcacacattggtgattggtgtgtgtctcggcagttgtggtggggccaccagatcccagcctacctagtcgtcgaggaccacgctcagggagaagaagactgctgggtcgtcggaaggagcgaggccgaagcacgggaggtagcggcagaactcacaggacgacccggagcagaactgacacttgagcgtgatccagacgtgctggatacatggttcagctccgctctctttcctttttccgcattaggatggcctcaggaaaccccagaccttgcgcgattctatccactgagtctcctcgagacaggatctgacctgctcctgttctgggtgggccgaatggttatgctggggacccagcttactggacagctgcccttttctaaagttttgctccacccaatggtgcgggataggcagggcagaaagatgtcgaagagtttgggcaatgttcttgaccctagggacatcatatccggagtggaaatgcagttactgcaggaaaaactgcgcagcgggaacttggacccggcagaattagccattgtggcagctgcacaaaagaaagattttccacacgggatccccgaatgcggcactgatgctctccggttcacattatgtagccacggtgttcaggctggcgacctgcacctgtccgtcagtgaggtccagagctgtagacacttctgcaacaaaatctggaacgcactgcgatttattttgaatgccttgggcgagaagtttgttccccagcctgctgaggagctctctcctagcagcccaatggatgcctggatccttagcaggttggctctggccgcacaagagtgtgagcgaggcttcctgactagggagctcagtctggtcactcatgccctgcatcacttttggctgcacaacttgtgtgacgtttaccttgaggcagtcaaaccggtgttgtggcacagtcctaggccccttggccctccccaggtcctgtttagctgcgcagacttggggctcaggctgctcgcaccccttatgccattccttgccgaagaactctggcaacgactgcctcccaggccgggatgcccacctgcacccagcatttctgtcgccccatatccatccgcgtgctcgctagagcactggaggcagcccgaactggagagaagattctcgcgggtgcaggaagtggttcaggtcctgcgagctctccgcgctacttatcagttaactaaggccaggccgagggtgttgctgcaatcgtcagaaccaggcgaccagggcctgtttgaagcctttctagagcctctcggcaccttaggttactgcggagccgtaggcctgttgcctcctggaaccgcagcaccgtccggttgggcgcaggccccattgtccgacaccgcgcaggtgtatatggagttgcaaggtctggtcgatccccaaatacagttgcctctgttagcagcaagaagatataagcttcaaaaacagttagactcccttaccgctaggacacccagcgaaggagaggccggaacccaacgccaacagaagctttccagcttacagctcgagttaagcaaacttgacaaggccgcaagtcacttacggcagctgatggacgaacctcccgcacccggatcgcctgaactctag

SEQ ID NO: 30599 - DNA, 96 bp, synthetic construct
  source 1..96: mol_type = other DNA; note = Synthetic coding sequence
atgagcgatgaagtgttctctacaacgttagcatatactaagagcccaaaggttacaaagagaaccacatttcaggacgagctgatccgggcttag

SEQ ID NO: 30600 - DNA, 606 bp, synthetic construct
  source 1..606: mol_type = other DNA; note = Synthetic coding sequence
atgccactgcagttgaagaatccaagattgcgtcagaaatcaaggacgcgatgcaacaagtctcagaaaaaggctgagcttctggataacgagaagcctgccgctgttgtcgcccctataacaactgggtacactgttaagatctccaactatggctgggaccagagcgacaaattcgttaaaatctatattacactcaccggcgtgcatcaagttccaactgagaacgtgcaggtccatttcacagaacgctcgtttgaccttctggttaagaatctcaatggcaagtcatacagtatgatcgtgaataacctcctgaagccaatttccgtggaaggatccagcaaaaaagtgaagacagacacagtgttgatcttgtgccgaaaaaaagtagaaaacactagatgggactacctgacccaggtagagaaggagtgtaaggagaaagagaaaccatcctacgataccgagacagacccatccgagggtcttatgaatgtcttgaagaagatctacgaggacggggacgatgacatgaaacgtacaataaacaaagcctgggttgaaagtagggaaaaacaggctaaaggcgacacagaattctag

SEQ ID NO: 30601 - DNA, 480 bp, synthetic construct
  source 1..480: mol_type = other DNA; note = Synthetic coding sequence
atggccacctcggcaccactgagatctctggaggaggaagtaacttgtagtatttgcctagattacctcagagatcctgtgaccattgattgcggacatgtgttttgcaggtcttgcactaccgatgtgcggccaataagtggctcaaggccagtctgcccactgtgcaaaaagccctttaagaaggagaatatccgcccagtgtggcaactggaaaaaatcttaaatcacttgtccactttgaggcgtgaccgggacaaaattcagggatttcaggctaaaggtgaagcagatatcctggccgctttaaaaaaactgcaggaccagcgccagtatatagtcgccgagtttgagcagggacaccaatttctgcgcgagcgcgaggagcaccttcttgagcagctggctaaactggagcaggagttaaccgagggtagggaaaaattcaagtctcggggtgtcggggaactcgctcggtag

SEQ ID NO: 30602 - DNA, 4599 bp, synthetic construct
  source 1..4599: mol_type = other DNA; note = Synthetic coding sequence
atgcagcgcgaattagtgtacgcccgaggggacgggcctggagccccacggccagggtctaccgcgcaccctcctcatgctatcccaaattcaccccctagtaccccggttccccactcaatgcctcctagcccaagcaggataccatatggagggacacgtagtatggtcgtccccggaaatgccacgattcccagagacaggatttcttcactccccgtttctcgccctatttcaccctctcccagcgctattttagagagacgcgacgtgaagccagacgaagatatgagtggaaaaaacattgccatgtatcgcaatgaggggttctacgcggatccctatctgtatcacgagggacggatgtcaattgctagcagtcacggaggacatccgctggacgttcctgaccatatcatcgcatatcaccgcaccgctattcggagcgcctccgcatactgcaatccaagcatgcaagcggaaatgcacatggagcagtccctatatcggcagaagtcccggaagtacccagatagccacctgccgacacttggctccaagacccccccagcctctccccatagggtctcggatctaaggatgattgatatgcacgcccattacaatgcccacgggcctccccataccatgcagccagaccgggcaagtccgtctaggcaagcgttcaaaaaagagccagggacgctcgtgtacattgaaaaaccaaggagtgccgcagggctctcctctttggtagatctggggccacctctgatggagaagcaggtttttgcttattccaccgcaacaatacctaaagaccgagaaacaagtgagaagatgatgaagaccaccgccaatcgtaatcatactgattctgccggtaccccacacgtttctggaggcaaaatgctatctgcactggaaagtaccgtgccccctagccaaccgccacctgtggggacatcagctatccacatgagcctgctcgagatgagacggagtgtggccgagcttagactgcagttgcagcagatgaggcagctccagttgcagaatcaggagttgctgcgtgcaatgatgaaaaaagctgagctggagataagtggtaaggtgatggagacaatgaaacggctcgaagatccggtccagcgtcagcgtgtgctggtggaacaggaaaggcagaagtacctgcacgaggaagagaagatcgtgaagaaactgtgtgagctggaggacttcgtggaagacctgaagaaggattccactgcagccagccgcctggtgacattaaaggatgtggaagacggggcatttctgctcagacaagttggcgaggccgtcgctactctcaaaggtgagtttcccaccctgcagaacaaaatgagggcaattcttcgcatcgaagtggaagctgtgcgctttttaaaggaagagccccataaactggattccctgttgaagcgggtgcgatcgatgacggatgtgctgacaatgctcaggaggcatgttacggatggccttctgaaaggcacagatgcggctcaggcagcccagtatatggcaatggaaaaggccactgctgctgaagtgcttaagtctcaagaggaggctgcgcacacgtccggccagccgttccacagcaccggagctcccggagacgctaagtcggaggtcgtacctttgtccgggatgatggttagacacgcccagagttcacctgtcgtcattcagcccagccagcattcagttgccctcctgaatcctgcccagaatctgccccacgtggcttccagcccagccgtgccccaagaggccacaagcacactgcagatgagtcaggcaccccagagcccacagatcccaatgaacggctctgccatgcagtctcttttcattgaagaaatccactccgtgtcggctaagaatagggcagtgtctattgagaaggcggaaaagaaatgggaagagaagcggcagaatttggatcactataacggaaaggagtttgaaaaacttttggaagaggcccaggctaacatcatgaaaagcatcccaaatctggagatgccacccgctactgggccactccctcggggagacgcgcctgttgataaagttgagctgagcgaggactcccccaacagtgagcaggatctggagaagctaggcggaaaatctcccccacccccaccccctccacctcggagaagctatctacccggatcagggctgacaacaactcgcagtggtgacgtggtctatactggccgaaaggaaaacatcaccgccaaggcctccagcgaagatgcaggacctagtccccagacccgagcaaccaagtatccggctgaagagcccgctagcgcctggacacccagtccccctcctgtaaccaccagcagctctaaggatgaagaggaggaagaggaagaaggagacaagatcatggcagagttgcaggctttccagaagtgctcatttatggacgtgaacagcaactcgcacgcggaacctagcagggctgattcccacgtcaaagatacgaggagtggagctaccgtgccacccaaagaaaagaagaacttggagttcttccacgaggatgttagaaagagcgacgtcgagtacgagaatgggcctcaaatggaatttcagaaggttaccactggggcagtacgcccatccgacccccctaaatgggaacggggaatggagaatagcatttcagatgcctcacgtacttccgaatacaaaactgagataatcatgaaagagaattcaatcagcaacatgagcctgctccgcgattctaggaattacagccaggagaccgtgcccaaggcaagttttggattctcagggatctcccctcttgaagatgagatcaataaaggcagcaaaattagcggattgcaatactcgatccccgacaccgagaaccagacgttgaactacggcaaaactaaagaaatggaaaagcagaacacagacaagtgtcatgtatcgagtcatactaggctgactgaaagtagcgtgcacgattttaaaaccgaggatcaggaggttattactacggattttgggcaggttgtattgaggccaaaggaagcacgacatgcaaatgtgaatccaaatgaggacggtgaatccagcagtagctctcccacagaggaaaacgccgcaactgacaacatagcatttatgattaccgagaccactgtccaagtcttaagcagcggcgaagtccatgatattgtgtcccagaagggtgaggatattcagaccgtgaatatcgacgctagaaaggaaatgaccccacgacaggaaggtacagacaatgaggatccggtggtttgcctcgacaagaagccagttattatcatttttgatgagcccatggacatccgatctgcctacaaacgcctatcgaccatatttgaagagtgcgacgaggagctagagaggatgatgatggaggaaaaaatagaggaggaagaagaagaggagaacggtgactccgtggtacagaataacaacactagccagatgagccacaaaaaagttgcccctggtaacttgagaaccggtcagcaggtcgagacaaagtcgcagcctcactctctcgcaactgaaactagaaaccccggagggcaggagatgaaccgaacagagctgaataagttctcacacgtggactctccgaacagcgagtgcaagggggaagacgccacagacgatcagtttgagtctccaaaaaaaaagtttaaatttaaatttccgaagaagcagctcgctgcgctcactcaagcaataaggactgggacaaaaacaggcaagaaaacgcttcaggtcgttgtatacgaagaggaggaggaagatgggaccctgaaacagcataaggaagctaaaaggttcgagatcgctcggtcccaacccgaagacacgccaacctcgataccgagcgccagtagaaagggcagcagtggggcaccccagactagtcgcatgccggtgcccatgagcgccaagaatcgaccaggaacactggacaagcctggtaagcaatcgaaacttcaggaccccaggcaatatagacaggcaaacggctccgccaagaagagcggaggggattttaaacctacatccccatctctccctgcaagtaaaatccccgctctcagtcctagctctggaaaatctagttctctgccgagcagctcgggcgatagtagcaacctccccaatccacccgctactaagcctagtatagcaagtaaccccctttcaccgcaaacggggcctcccgcacactcagcttccctaatccccagtgtgtcaaacggatcccttaagttccagagcttaacccacaccggaaaaggtcatcacctctcattcagcccccagtcccaaaatggacgggctccgccaccgctttccttttcttcttcccccccaagtcccgcatcttcagtgtcacttaaccagggagccaaaggcactcggacgatccacacaccatctctcacatcatacaaggcgcaaaatgggagctctagtaaggctacgcctagcacagctaaggagactagctag

SEQ ID NO: 30603 - DNA, 1566 bp, synthetic construct
  source 1..1566: mol_type = other DNA; note = Synthetic coding sequence
atgacaagtgcttttaaactggactttctacctgatatgatggtggaggggaggctgctggtgcctgaccgaatcaacggtacggccaacaaaatgaacggggctctcgatcattcggaccaacccgatccagatgccattaagatgtttgtaggtcagattccacgtagttggtccgagaaggaacttaaggagctctttgaaccttatggcgctgtgtaccaaataaacgtgctgagagatagaagccaaaaccctccgcagagcaaggggtgctgttttgtgacgttttacacacgaaaagctgcactcgaggcccagaacgcgctacacaacataaagactctgcctgggatgcaccaccctattcagatgaaacccgctgacagcgagaaatccaacgctgtggaggaccgcaagctgttcatcgggatggtgagcaaaaaatgcaacgaaaatgatatacgagtcatgttttcgcctttcggccaaattgaggagtgtcgcatcctgcgcggacctgacggccttagtcggggttgtgccttcgtcacattcagcactcgcgctatggcccagaatgctataaaggccatgcatcagtcacagaccatggagggttgttcgagtcctattgtagttaagtttgctgatacccagaaggacaaggagcaacggcgactgcagcaacaactggctcagcagatgcaacagctgaacacagctacctggggcaatttgactgggctggggggactgactccgcagtatctggcccttttacagcaggccacaagctcttccaatctgggagccttttccggcattcaacagatggccggaatgaatgctctacagctgcagaatctcgcaacactggctgcagccgctgctgctgcccagaccagcgccacatcaacgaatgccaaccctctgtccaccacaagctcagccctcggagctctcacctccccagtggctgccagcactccaaattcaactgccggtgctgcaatgaactccctaacaagtcttggcactctccaaggactggccggagcaaccgtgggcctgaataacataaatgcccttgctgttgcacagatgctctccggcatggcagctctaaatggaggcctcggagctacgggcctcactaatggcactgccggtaccatggatgctcttacgcaggcgtactccggcatacagcagtacgcagccgctgctctgcctacattgtactctcagagtttgctgcagcaacagtctgccgcaggcagccagaaggagggcccagaaggggcaaacctgttcatctaccatctaccacaagaatttggcgaccaggatatccttcagatgttcatgcctttcggaaacgttatctccgctaaggtattcatcgacaagcaaacaaacctttcgaaatgttttgggtttgtgtcttatgacaacccagtctccgcccaggcagcaatacaggccatgaacggtttccagattgggatgaagcgtcttaaagtccaactcaagcggtccaagaatgattctaagccgtattag

SEQ ID NO: 30604 - DNA, 315 bp, synthetic construct
  source 1..315: mol_type = other DNA; note = Synthetic coding sequence
atgagtgaacagggcgacctcaatcaggctatagccgaggaaggaggcaccgaacaagaaaccgccacccccgagaacggaatcgtgaaaagcgagtccctcgacgaggaagagaagctggaactgcagagacgcctggaagctcagaatcaggaacgaagaaagtccaagtcaggcgctggcaagggtaagctgacccgctctctcgcagtgtgcgaagaatctagtgccagacccggaggggagtctctgcaggaccaagaaagtatccatttacaactctcgtctttctcatcactccaggaggaggactag

SEQ ID NO: 30605 - DNA, 1653 bp, synthetic construct
  source 1..1653: mol_type = other DNA; note = Synthetic coding sequence
atggagccaccacaggagacaaatcggccttttagtaccctggacaatcggagcggacaggttcaggttctttcagctacaccattgctacagagaaacccttactctagcccagatatcatgcatattaagggctcggaagcctcaagtgtgccctacgcactaaatcagggaactaccgctttacctaagaataaaaatcaggaaggtaccggccataggctgttaaacatgctaaggaagaccctcaaggaatcagattctgaagagctggagatcactcaggagacccccaacctggtgccattcggggacgtggtgggatgcctaggcatccacattaaaaattgcaggcacttcatgcccaagataagtttgcagcattacgcaaatcttttcattcgtatctcaattaataaagctgtgaagtgcacaaaaatgtgcagccttctctccaaaaatgacgaaaaaaataccgtaatcaagttcgatgaagtcaagtacttttccgtgcaggtgcctagacggtacgatgataagcgaaacaatatcctgctggaactcattcaatacgacaaccgggagaaacgtgccttcttgttgggaagtgtgcagatccatctctacgaagtaatccagaaaggctgctttatcgaagaagtgcaggttctacatggcaatatctttgtctgtcggctagaggtggagttcatgttttcctacggcaattttgggtatgggttcagtcaccagctgaagccgttgcagaaaatcacagagccttcaatgttcatgaacctggcccctcccccagagcgaaccgatccagtgacgaaggtaatcaccccacagacagtagagtaccctgcattcctgtcccccgatctgaacgtaacagtggggacgcctgctgtgcaaagtagcaatcaaccctctgtcgtccggcttgagaagctgcagcagcagccccgagagcgcctggagaagatgaagaaggaatatcgaaacctaaatacctggatagataaagcaaattaccttgaaagtatcctgatgcctaagctcgaacacaaagacagcgaggaaacaaacattgatgaggcttccgaaaacaccaagtcaaatcatcccgaggaagaactggaaaatatcgtgggggtggacatccccttagtgaatgaggaggctgaaacaacagctaatgagctcctcgataatgactccgaaaagggcctcaccatccccacactgaaccagagcgaccaagataacagcaccgccgacgcaagcaaaaatgatgagtctacgccatcccccacggaggttcactcactctgcacaattagtaaccaggagactatcaaggccggaagaatccctccactgggggagcggcagagcgaatctatgcccgataggaagatgaaaaatgtcttttttcccttagaagtgaaactgaaagacaattaccccagtattttgaaggccgactcttctttatccgaagtgaatctgcgctctatctgcattaatcctaaaagtcgaaatttagacagctctccaactgagatctcttggcagaacaataatcttaatctggccgagcgcgaaaatacaggtctggtgtctacgcggctcaaaattaagcggtag

SEQ ID NO: 30606 - DNA, 363 bp, synthetic construct
  source 1..363: mol_type = other DNA; note = Synthetic coding sequence
atgagcatcagctctgatgaggtcaatttccttgtgtaccggtatttgcaggaatcaggcttctcacacagcgcattcacattcggcatagagagtcacataagtcaatctaacatcaacggagccctggtgcctccagctgctctgatctctataatacagaaggggttacagtatgtcgaagccgaagtgtcaatcaatgaagatggcaccctgtttgatggcaggccgatagagtctttgtcgctcatcgacgcggtgatgccggacgtcgtgcagacaagacagcaggcctaccgcgataagctggcccagcagcaggctgctgctgccgctgcagccgctgccgcagcttcccagtag

SEQ ID NO: 30607 - DNA, 222 bp, synthetic construct
  source 1..222: mol_type = other DNA; note = Synthetic coding sequence
atgagctactatcaacggccattcagccctagtgcatacagccttcccgcaagtctgaacagcagtattgtaatgcagcacgggacttcgctcgatagcactgatacatacccccagcacgctcaaagcctggatggtacaacatcatctagcattcctctctacaggtcaagcgaggaagaaaagcgagtgactgtcattaaagcccctcattacccatag

SEQ ID NO: 30608 - DNA, 717 bp, synthetic construct
  source 1..717: mol_type = other DNA; note = Synthetic coding sequence
atgactgaagactcccagcggaatttccgcagtgtttattatgaaaaagttggatttagaggagtcgaagaaaaaaagtccttagaaatcctgctaaaagatgaccgtcttggtatcttgcctccccatcatgagtcgcacgcaaaggtgatgatgtatcgcaaggaacagtatttggacgtgctgcacgcactcaaagttgtgcgcttcgtgagtgatgccacccctcaagccgaggtctacctgcgcatgtaccagctggaaagtggtaagctaccacgctcaccctctttccccctcgaaccggatgatgaggtctttctggccatcgcaaaagccatggaggagatggtggaagactccgtcgattgctattggattacccggcgtttcgttaaccagctaaatacaaagtatagagattctctgcctcagctccctaaagcatttgaacagtacctgaatctcgaggatgggagactcctgacacacctgcgcatgtgcagcgccgcacctaaactgccctatgacctctggttcaagcgctgcttcgccggatgcctgcctgagtcaagcctgcagcgggtgtgggataaagtagtgagtgggtcgtgtaaaatcttggtcttcgtggcggtcgaaattctcctgactttcaaaattaaggtgatggcacttaatagcgccgagaaaatcacaaagttcctagagaactag

SEQ ID NO: 30609 - DNA, 1620 bp, synthetic construct
  source 1..1620: mol_type = other DNA; note = Synthetic coding sequence
atggccacctccgctccactgcgaagcctcgaggaagaagtgacctgcagtatctgccttgactacctgagggacccggtgacaatcgactgtgggcatgttttctgccggtcttgtaccacggatgtgaggcctatttcgggaagtcgcccagtctgcccactgtgcaagaagccattcaagaaggagaacattcgaccagtttggcaacttgccagtctagtagagaacatcgaaagactcaaagtggacaagggacggcagccaggtgaagtaacccgtgagcagcaagacgccaaactgtgcgaacgacaccgcgaaaagctacactactactgcgaagatgatggcaaactcttgtgtgtcatgtgtcgcgaaagccgggaacataggcctcataccgcggtgttgatggagaaagcagcccagcctcaccgggagaagatattgaatcacttaagcacactgcgccgtgaccgcgataaaattcaggggttccaggccaagggtgaggcagacattctggcagccttgaagaagctgcaggatcaaaggcagtatattgtagccgagttcgagcagggacaccagtttctgcgggagcgcgaggaacatttgctggaacagttggctaagctagagcaagagctcaccgagggacgagagaaatttaaatcacgcggagtgggagaattagccaggctggcccttgttataagtgagctagagggtaaagcccaacagcccgcagcagagctcatgcaagacactagggactttttgaatcgctaccctaggaaaaagttctgggtgggcaagcctatcgcacgcgtcgtgaagaaaaaaaccggagaattcagcgacaaactgctgtcacttcagaggggcctcagagaattccagggtaaactgctgcgggatctggagtataagacagtctccgtaactttggatccccaatctgcgagcggataccttcagctgagcgaagactggaagtgtgtgacatataccagcctgtataagtccgcctacttgcaccctcagcagttcgactgtgagcctggcgttcttggctccaagggatttacctggggcaaagtttactgggaggttgaggtggaaagagaggggtggtctgaagacgaagaagaaggtgacgaagaagaggaaggggaagaggaagaagaagaggaggaggccggttacggtgacgggtacgatgattgggagaccgacgaagacgaggaatctcttggtgacgaggaggaggaagaggaggaggaagaggaggaagtccttgagtcatgcatggtgggcgtggcccgtgactcagtcaaacgtaagggcgatctcagcctgcggccagaggacggggtatgggcactgcggctgagttccagcggaatctgggccaatacaagccctgaagcggaattgttccctgctttgcggcctagacgcgtcggcatcgctttggattatgaaggcggaaccgttaccttcaccaatgccgaaagccaggaacttatttacacgttcacagcaacgttcaccagacgcctggtgccattcttgtggttgaagtggccaggtactcgtctcctcctgcgcccatag

SEQ ID NO: 30610 - DNA, 609 bp, synthetic construct
  source 1..609: mol_type = other DNA; note = Synthetic coding sequence
atgggacagaaagtcactgggggaattaaaaccgttgacatgcgcgacccaacttaccgccctctcaagcaagagctccagggtctggactattgcaagccaactcggttagatcttctgctggatatgccgccagtgtcctacgatgtccagctgctacattcttggaataacaacgatcgcagcctaaacgtctttgtgaaagaggacgataaattgattttccaccgacaccctgtggctcagagtacggacgctattcgtgggaaagtgggttacactcggggtttgcatgtctggcagattacctgggctatgaggcaacgtggcacccacgctgtggtgggcgtggcaacggcagacgccccactccattcagtggggtacacgacattagtcggcaataatcatgagtcttggggttgggatctgggcaggaaccggctgtatcacgatggaaaaaatcagccatcaaaaacctatcccgctttcttagagccagacgaaacttttatcgtccctgactcattcctggttgcactcgacatggatgacggcactctgtccttcattgtagacggacagtacatgggggtggcatttcgctag

SEQ ID NO: 30611 - DNA, 174 bp, synthetic construct
  source 1..174: mol_type = other DNA; note = Synthetic coding sequence
aatctgcctatctgtatggcaaaaacccacctaagcctgagccatcaacctgataaaaagggcgtacccagggatttcatcctgcctatcagcgatgtcagggcctctatcggagccggttttatttaccccctggtcgggaccgggggacgggaggcacctttgtggctgtag

SEQ ID NO: 30612 - DNA, 468 bp, synthetic construct
  source 1..468: mol_type = other DNA; note = Synthetic coding sequence
atgaacaatcagaagcagcaaaaaccaaccctctctggccaaaggttcaaaacccgcaagcgcgatgaaaaagagcgctttgacccaactcagtttcaggattgcatcattcagggactgactgagacaggtactgacctggaggcggttgctaaatttctcgatgccagtggcgctaaactggattatagacgatacgccgagaccctgtttgacatattagtggcaggcggtatgttagcgccaggcggtaccctggccgatgatatgatgcgtactgacgtgtgcgtgtttgccgcacaagaggatttggaaaccatgcaggcatttgctcaggtcttcaacaaattgattaggcgttacaagtacttagaaaaagggtttgaagacgaagtaaaaaaactcctgctgtttctgaaaggattctcagagagcgaaaggaataaactcgccatgctgacggggtag

SEQ ID NO: 30613 - DNA, 528 bp, synthetic construct
  source 1..528: mol_type = other DNA; note = Synthetic coding sequence
tagttcgatgatcaaaggcggatgagcttgcatctgcacggtgctgactgcgatccgaaaacccagaatgagatgaacatctgtgaagaagagtttgtcgagtacaaaaatagggatgcaatttctgctctcatgccactgttcagtgaagaggagtctagtgatggttccaaacataacaatggtcttccagaccacatcagcgcccagctgcagaacacctacactctgaaagcctttactgtcggatcaaagtgtgtagtctggtcttctctacgcaacacatggtctaagtgtgagattctggaaacagccgaggagggaacgagagtactgaacctatccaatggtatggaagaaattgtcaaccccgaaaacgtctggaacggtatccctaaacttgacaagagcccgcctgaggctgtgtcacagagggtggggaaggacctgtatttcatgagtgttggggacacaactattaaggaaaaaggttttggtggggatggcgacctgactgtggacctctag

SEQ ID NO: 30614 - DNA, 2814 bp, synthetic construct
  source 1..2814: mol_type = other DNA; note = Synthetic coding sequence
tagctgagatcacagcccggatgtgggtgcttgtggcaggaagctccgacccattctacagggccaagcgtggaaggggaggccccatcctccgaaaccggtacctcattagattcaccatcagcttatcctcaggggcctctcgtacctggctctagcttatcccctgatcattacgagcatacatctgtgggcgcttacgggttatattcaggtccgcctggccagcagcagcggacgcgcagaccaaaattgcagcattccacttctatcctcagaaaacaggctgaagaagaggccattaagaggagccggtcactgagcgagagttacgagctgagctccgatctgcaagataagcaagtggagatgctggaacgaaaatatggcggtagactcgtcacccgtcatgccgctagaaccatccaaacagcatttaggcagtatcaaatgaataagaacttcgagcgactacgttcttctatgtccgagaacaggatgagccgcaggattgttcttagtaatatgaggatgcaatttagcttcgaaggccctgagaaagttcactcttcctatttcgaggggaagcaggtcagtgttaccaacgatgggagccagctgggtgccctggtaagccccgaatgtggggacttgagtgaacccaccacgcttaaatcgcctgccccatcctccgatttcgctgacgctattacggagctggaggacgctttctctcgccaagtgaaatctctggcagagtccatcgatgatgcattgaactgccggtctctgcatacagaagaggcgccagccctcgatgctgccagggccagagacacagaaccccagactgccttgcatggaatggatcaccgtaagctggatgaaatgactgccagttatagcgacgtaacactgtacatcgatgaggaagaactgtccccccctcttcccttgagccaagctggagatagaccctccagcaccgagagcgatctccggttgcgtgccggtggcgctgcgcctgactactgggctctggcacataaggaggataaggcagatacggatacatcttgtagatctacaccttccctggaaagacaggagcagcgacttagagtcgaacacctgcctctactcacaattgagcctcccagtgattcctccgttgacctctcagatcgtagcgagagaggctcactgaagaggcagtccgcctatgagcgctccttaggcggacagcagggaagccccaaacacggcccacactcaggggcaccaaaaagcctacctcgagaggagccggagctgcgtccacgaccacctcggcctcttgacagccatctcgctattaatggatcagcgaataggcagtcaaaaagcgagagcgactatagtgatggagataatgattccatcaacagtacttccaatagcaacgacaccataaattgctcttctgagagctctagccgggattctcttagggaacaaacactgtctaaacagacctatcacaaagaggctaggaattcttgggatagtcccgcattctcaaatgacgtgatccggaaacggcattacagaattggtctgaatctctttaataagaaacctgagaagggcgtgcaatacctgattgagcgcggatttgtgcccgatacaccagtgggggtagctcatttccttttgcagcggaaagggctgtctcgtcagatgattggagaattcctgggtaataggcagaagcagttcaaccgcgatgtgcttgactgtgtggtcgatgagatggacttctccactatggaactcgacgaggccctgcgaaaatttcaggctcatatacgagtgcagggggaagcacagaaagtggaacgcctgattgaagctttttcccagcgttactgtatctgtaacccaggagtggtgcggcaattccggaaccccgataccatttttattctggccttcgccatcatccttctgaataccgacatgtacagccccaatgtcaagccagagcggaagatgaaactggaagactttattaagaacctccgcggagtggatgacggtgaggatattccaagagagatgttgatgggcatctacgagcgaatccggaagagggagttaaagacaaacgaagaccatgtttcccaggtgcagaaagtggagaaactgatcgtaggtaaaaagccaatcggcagtctgcaccccggacttggctgcgtactgagtcttccccacaggaggctggtttgttattgtaggctctttgaggtccctgacccgaacaaaccacagaaactgggtctgcatcagcgagagatttttctctttaacgatctgctggtcgttaccaagatttttcagaagaagaaaaacagcgtcacatactcctttaggcagtcattctctttgtacggcatgcaggttcttctgttcgagaaccagtactatcccaacggcatcaggctcacaagctccgtccccggagccgatattaaggttttgatcaactttaatgcacccaaccctcaagatcggaaaaagttcactgatgacctgcgcgaatctattgcagaagtgcaagagatggagaaacatagaatcgagtccgaactcgaaaagcagaagggagtagtgcggccaagcatgtcgcagtgttcttctctgaagaaagaatctggcaacggcactctgagtcgcgcatgcttggacgatagttatgcctccggagaggggctgaagcgtagcgccttatcctcttcgctgcgggacctttccgaggccggagtccatcactag

SEQ ID NO: 30615 - DNA, 198 bp, synthetic construct
  source 1..198: mol_type = other DNA; note = Synthetic coding sequence
atggtggaggccgcagatcgagaaaaagtcgagctgctcaatcaacttgaagaagaaaaacgcaaggtcgaggatcttcagtttcgagtcgaagaggaaagcattaccaaaggtgatctggagcaaaagtctcagatctcagaggacccagaaaatgtcgccaccgtatcggagaagtctcggatcatggagctgtag

SEQ ID NO: 30616 - DNA, 630 bp, synthetic construct
  source 1..630: mol_type = other DNA; note = Synthetic coding sequence
atggattttctgctggggaacccgttttccagtccggtggggcagcgaatcgaaaaggccactgatggctcattgcagtctgaagactgggcactgaatatggagatctgtgacatcatcaacgaaactgaggagggtccgaaagatgccttaagggctgtcaagaagaggatcgtgggcaataagaatttccatgaggtaatgctcgctctaacagtgctcgagacctgtgttaagaattgcggacatcggttccatgtcctcgtggcatcccaagacttcgttgagagtgttctcgtccgaacgatccttccaaagaacaaccccccaaccatcgtccatgacaaggtgttaaacctaattcaaagctgggctgacgcattcaggtcatcacccgatcttactggcgtggtgactatctatgaagatctgaggcgcaaaggcctcgagttccctatgacggacctggacatgctgagcccgatccataccccacggggtccctgctctacccagagacacaaccaggatagaattctctgggctctgacccccgcttcaaaacggacactggcctcgatgctccccctctgccctccacggccatactctccagttacgcgcccatag

SEQ ID NO: 30617 - DNA, 255 bp, synthetic construct
  source 1..255: mol_type = other DNA; note = Synthetic coding sequence
atggctgatacggatttattcatggagtgtgaggaagaagagctggaaccatggcagaagattagcgatgtaattgaggactccgtggttgaggactataactccgtcgacaagacaactactgctggcaaccccttggttcagcagggtggacagcctcttattctgacccagaatccagccccaggtctcggcaccatggtaacccagcctgtgttacgccctgtgcaggtgatgcagaatgctaaccattag

SEQ ID NO: 30618 - DNA, 618 bp, synthetic construct
  source 1..618: mol_type = other DNA; note = Synthetic coding sequence
atggctacccccctgggttggagcaaggcgggttctgggtctgtctgcctggcactcgaccagttgagagatgttattgagtcacaggaggaactgattcaccagctgagaaacgtcatggtgctgcaggacgaaaatttcgtgagcaaggaggaattccaagccgttgagaaaaagctcgtcgaagaaaaggctgcccacgccaagacaaaggtgcttcttgcgaaagaagaggaaaagctgcagttcgccctgggagaagttgaagtactctctaaacagcttgagaaggagaaattggccttcgagaaagcattgtcttctgtgaagagtaaagtgctgcaggagagtagcaagaaagaccaactcataacgaaatgtaacgaaattgagagtcacataattaagcaggaggacatcctgaatggtaaagaaaacgagattaaagagctgcagcaggtgatcagtcaacaaaaacagatctttcgaaaccacatgtccgacttcaggatccagaaacagcaggagagttacatggctcaggtgctggaccagaaacataagaaagcgagcggaactaggcaggccagatctcaccagcacccgagagagaaatag

SEQ ID NO: 30619 - DNA, 330 bp, synthetic construct
  source 1..330: mol_type = other DNA; note = Synthetic coding sequence
atggaaccaagtgcacagcaactgcagctggctgcctcactacctgctaacctcagcaacttttgccaaggcagcgaaatgccgacaacctctcggccagccctggacgttaagggaggaacatctccagctaaagaggacgccaaccaggagatgtccagtgtagcttactctaacctcgccgtgaaggatcgcaaggccgtggcaatactccactaccctggcgttgcttctaatggaactaaagccagcggcgcaccaacgagcagttccggtagcccaattggtagtcccacaaccactcctcccacgaagccgccatccttttag

SEQ ID NO: 30620 - DNA, 1737 bp, synthetic construct
  source 1..1737: mol_type = other DNA; note = Synthetic coding sequence
atgccagaaattcgggtgacgccattaggggctggtcaggatgtggggaggtcttgcatcctggtttcaatcgctggaaaaaatgtgatgctcgattgtgggatgcacatgggctttaacgacgaccgacggttcccggatttctcttacattacacagaatgggcgtttaacagactttctagactgtgttattatctctcatttccaccttgaccattgcggtgcactcccgtacttctccgaaatggtcgggtacgacggacccatttacatgacgcacccaacccaggcaatatgcccaatcctgctcgaggattatagaaagattgcagtggacaagaagggggaggccaactttttcacttctcaaatgattaaggactgcatgaaaaaagtggtcgccgtgcacctgcaccagactgtccagatcaaggtggggtccgaaagcgtggtgtacactggagattacaatatgacccctgatcgccacttgggagccgcatggatagataagtgtcggcctaatttgctgatcacggagtcaacatacgctactaccattcgtgacagtaaacgctgtcgggagagagacttcctcaagaaagttcacgagacggtcgagcgagggggaaaagtccttatccctgtgttcgccctaggacgagcgcaggagctgtgtatccttctagagacattttgggagagaatgaatctgaaggtgccgatttacttctctaccggcctcacagagaaggctaaccattactataagctgtttatcccctggactaaccagaagattcgcaaaactttcgttcagcgtaacatgtttgagttcaaacatataaaagcattcgacagggcatttgccgacaaccctggtcctatggtagtctttgcaactcctggcatgctccacgccggacagagtctgcagattttccgcaaatgggctggaaacgaaaaaaatatggttatcatgccaggatattgtgtgcagggcactgtaggacacaaaattctctctggacagcgcaagctggaaatggaggggaggcaggtacttgaagtgaaaatgcaagtcgagtacatgtccttttcagcgcatgccgacgccaaggggataatgcagctggtcggccaggctgagccggaaagtgtgcttttggtgcacggtgaggccaaaaaaatggagttcctgaagcagaaaattgagcaggagttgagggtaaactgttatatgcccgctaacggcgagaccgtgactctccctacaagcccttctatccccgtgggcatctccctgggattactgaagagggaaatggcgcaaggactgttgccggaggcgaagaaacctcggcttctgcacggtaccttaataatgaaagatagtaactttcgtctggtcagcagcgaacaggcactgaaagagctgggcctggcagaacatcagctgcgctttacttgccgcgtccacctccacgacacgaggaaagaacaggagactgccctgagggtctattcccatttaaaatcagtgcttaaagatcactgtgtccagcacctgccggacgggtccgttactgtcgaaagtgtgctgcttcaagcggcagctccttctgaagacccgggaacaaaggtactactggtcagctggacttaccaggatgaggaactgggctcttttctgacatctttgttaaaaaaaggcctgcctcaggcccctagttag

SEQ ID NO: 30621 - DNA, 570 bp, synthetic construct
  source 1..570: mol_type = other DNA; note = Synthetic coding sequence
atgcagccaatgtcattcggctgggatcatagtctacataaacgcaagaggttgccacccgtcaaacggagtctggtttactatctgaaaaatcgggaagttcgcttgcaaaacgaaaccagctactcgcgggttcttcatggctacgccgctcagcagctgccttcgctcctaaaagaacgtgaattccatcttggcacccttaacaaggtgtttgcttcacagtggctgaaccatcggcaggttgtgtgcggtacaaaatgtaacactttgtttgtcgtagacgtccaaacctcgcagattaccaaaatccccatcttgaaggacagggaaccaggaggagtgacacagcaggggtgtggcattcacgccattgaactgaatccttcccggactctgcttgctactggtggagacaaccccaattcacttgccatctaccgccttcccactcttgatcccgtgtgcgtgggagatgacgggcataaggattggatattcagcattgcttggatctctgacaccatggctgtgagtgggtcacgcgatggatccatgggcctctggtag

SEQ ID NO: 30622 - DNA, 2289 bp, synthetic construct
  source 1..2289: mol_type = other DNA; note = Synthetic coding sequence
atggcaagtctactgcaggaccaactcacaactgaccaggaccttttgctaatgcaggaggggatgccaatgaggaaagtgagaagcaagtcttggaaaaagttgaggtattttaggctgcagaacgatggaatgacggtctggcacgcacgacaagccaggggcagcgccaagcctagctttagcatttccgatgttgagaccattcgaaacggacatgacagcgagttgttaagaagcctggccgaggagttgccactggagcagggattcactatagtcttccacggaaggagaagcaatctcgacctgatggcaaactccgtggaggaggcccagatctggatgcgcggactccagctgctggtcgatctggtgacatccatggatcaccaggagcgactggaccagtggctgagcgattggttccaacggggtgacaagaatcaggatgggaagatgtctttccaggaagttcaacgcctactgcatctgatgaatgtggagatggatcaggagtacgcattcagtttgttccaggccgctgatactagtcagagtggaacgctggagggcgaagaatttgtccaattttataaagccttaacaaagcgggctgaggtacaggagctgtttgagtccttcagtgccgacggacaaaagttaactttactcgagttcctggactttctccaggaggaacagaaagaaagggattgtactagtgagctggccctggagttgatcgaccgatacgagccctccgacagtgggaagttacgtcacgtgttgagtatggatggtttcctgagctatctctgcagcaaggatggtgatatattcaatccggcatgtctgcctatttatcaggacatgacacagcctttgaatcattacttcatctgcagttcccacaacacctatctcgtaggcgaccagctctgcggccaatcttccgttgaggggtatattcgagcccttaaacggggatgccggtgtgtcgaggtggatgtgtgggatggccctagcggcgaacctgttgtctatcacggccacacactgacgtctaggatcctgtttaaagacgtagtggccacagtggcccagtacgcatttcagacgtccgactaccccgtgatcctgagtctggaaacccactgctcttgggaacagcagcagacgatggccaggcatctcacggaaattctgggggaacaactgctcagcacgactttagatggggttttgcctactcaattgccttcgcctgaagagctgcgccgaaagatactcgtgaaaggcaagaagctcacactggaggaggatttggagtatgaggaagaggaggctgaacctgagttagaagagtccgaactggctctggaatctcagttcgaaactgaacccgagccccaagagcagaatctccagaataaggacaagaagaaaaagagcaaacctatactctgcccggctctgtcaagtttagtaatctacctgaagtcagtatcgtttcgctcattcacacactcgaaggagcactaccatttttatgagatctcgtccttttctgaaacaaaggccaagcgcttaatcaaggaagccggaaacgagttcgtgcagcacaatacctggcagctgtccagggtgtaccccagcggcttgagaaccgatagttctaactataatcctcaggagctctggaacgccggttgtcagatggtcgcaatgaacatgcaaacagcaggactagaaatggacatatgcgacggacactttagacagaacggcggatgcggttacgtgctgaagcctgacttcctgcgggacatccagtcctcgttccatcctgagaagcccattagcccctttaaggcccagacacttttgatccaggtgatctcaggccaacagctgcccaaggtcgataaaacgaaagagggaagcatcgtggatccactggtcaaagtgcaaatttttggtgtgaggctcgacaccgctcgacaagagacaaattatgtcgaaaacaatgggtttaatccttactggggccagacgctgtgttttagagttctggtgcccgagctcgccatgctgcgattcgtggtaatggactatgattggaagtcacggaatgattttatcggccaatacactctgccttggacatgcatgcagcaggggtatagacatattcatctattgtccaaggacggaatatctctacgacctgcttccattttcgtctacatctgcatccaagagggactagagggggatgagagttag

SEQ ID NO: 30623 - DNA, 1362 bp, synthetic construct
  source 1..1362: mol_type = other DNA; note = Synthetic coding sequence
atggccggagccgcaggccgtgtgcaggacagagccttgcggcgatttcccataaccttaccagtgggagatttatcaaatttacatttaaaagaggaaaaaataaaacctgacaccaacggcgcagttgtcaaaactaatgcaaatgctgagaaaacggacgaagaggaaaaagaggatcgcgctgctcagtcactgctgaacaaattgattcgtagcaatttagtagacaacaccaatcaggtagaagtgctgcaaagagatcctaacagtccgctgtactctgtaaagtccttcgaagagttgagactgcctcagaaccttatagctcagtcccagtcagggactgggaagactgccgcattcgtcttggccatgctttcccaggttgagcccgcaaacaagtacccacagtgcctctgcctgtcaccgacttacgaactggccctgcagacagggaaggttatagaacagatgggaaagttttacccagagctgaaactggcctacgccgtacgtggtaacaagctggagcgaggccagaagatctcagaacaaattgtgattggcaccccaggcacagtgctggactggtgtagtaaactaaagttcattgatccaaaaaaaatcaaagtattcgtgctggatgaagctgatgtaatgatagctacccaaggccaccaagatcaatccatcagaatacagaggatgttgcctcggaattgtcagatgctactgttctccgctacatttgaagactccgtgtggaagtttgcccagaaagtggtgcctgatcccaacgtgataaaattaaaaagagaggaagaaactctcgatactatcaaacagtattatgtgctttgctcatcccgggatgagaagttccaggccttatgtaacctgtacggcgcaataactatcgcacaggccatgatattctgtcacacccggaaaactgcgtcctggctggccgcagagctgagtaaggagggccatcaggtggccctgctgtccggggagatgatggtggagcagagagcagctgtgattgagagatttagagaggggaaggaaaaagtccttgttacgaccaatgtgtgtgcacgcggaatagacgtggagcaggtgtctgtggtgattaactttgacctcccggttgacaaggatggcaatccagacaacgagacctacctgcacaggatcggcagaaccggacggttcgggaagcgcggtctggctgttaatatggttgacagtaagcactcgatgaatatcttaaatcgcatccaggagcattttaacaaaaaaattgaaagattggataccgacgatttggatgaaatcgaaaaaattgccaattag

SEQ ID NO: 30624 - DNA, 921 bp, synthetic construct
  source 1..921: mol_type = other DNA; note = Synthetic coding sequence
atggctcgtgtgccccttggcaggtcactcaccctgagtcctcgcttggagcacaacggcatgacaagcgcgcatcataactttaggctgccagggagccgggacagtccggcttctgcatctcaggtggcggagatcatcgacctggagtggtacgaaaaaagcgaagagactcatgcctcgcagatcgagctccttgagacgtccagcactcaagaacctctgaacgcatccgaggcattttgccccagggactgtatggttcctgtggtgttcccaggccctgtaagccaggaggggtgctgccagtttacatgtgagttgttgaagcacatcatgtaccagagacagcagctgcctttgccctacgagcagcttaagcacttctataggaagccttctcctcaagccgaggagatgttaaagaaaaaaccacgagctaccactgaggtgagtagccgcaagtgccagcaagcgctggccgaattggaatccgttctgtcacacctcgaagatttttttgccagaacattggttccaagagttcttatcctgctgggaggcaatgcgctgagccccaaggaattttacgagctcgatctgtccttgctggccccatactccgtggaccagagcctttctacggcagcttgtctccgacggctgtttagagctatttttatggcagatgctttctcagaattgcaggctccgccactaatgggaaccgtggttatggcccagggccatagaaattgtggtgaggactggtttagaccaaagcttaattacagagttccctctaggggccacaaacttactgttactctgtcctgtgggagaccttccatcaggacaacagcttgggaagactatatctggttccaggcccctgttacctttaaggggttccgcgagtag

SEQ ID NO: 30625 - DNA, 426 bp, synthetic construct
  source 1..426: mol_type = other DNA; note = Synthetic coding sequence
atgcctcagctccttcagaatatcaacggaataattgaggcattccggcgttacgccagaacggagggcaattgcacggctctgacaaggggcgagcttaaacgcttgctggaacaggagtttgcggatgtcatcgtgaaacctcatgacccggctacagtggacgaggtgcttcgattgttggatgaggaccatacaggcactgtagagtttaaggaatttctcgtgcttgtgttcaaagtggctcaggcatgtttcaagacactgagcgaatccgccgagggggcttgtggcagtcaagagtctggcagcctgcactctggagcatcacaggagctggggttcaggcccagagtgcgtcctctcgccttaaggggttctgctgcaatgaccggaaagttgtctcccagagcacggaaggagtag

SEQ ID NO: 30626 - DNA, 480 bp, synthetic construct
  source 1..480: mol_type = other DNA; note = Synthetic coding sequence
atggcgactagcgcgccactccgatctttggaggaggaagttacctgttcaatatgtctggactatctccgcgatcctgtaacaattgactgtgggcacgtgttttgtcgatcatgtaccaccgatgtgcggccaatctcaggatcccggccagtgtgccccttgtgtaagaaaccgttcaaaaaggaaaacatcaggcctgtgtggcagctagagaaaatcttgaaccatctctctactctgcgaagagatagggataaaatacaaggcttccaggccaaaggggaggctgatatcttggcagcacttaagaaacttcaggatcagcgacagtacatcgtcgccgagttcgagcagggccaccagttcctgagggaaagagaggaacacctgctcgaacaactggcaaaactggaacaggagctaacagaagggagggaaaagtttaaatcaagaggggttggagaattggccagatag

SEQ ID NO: 30627 - DNA, 1506 bp, synthetic construct
  source 1..1506: mol_type = other DNA; note = Synthetic coding sequence
atggattttctcctggggaatcctttcagtagcccagtcggccagaggattgagaaggccacagacggttccttacagtccgaggactgggccttgaacatggagatctgcgacataattaacgaaactgaagagggcccaaaagacgcccttcgagcggtgaaaaaacgcattgtgggcaacaaaaacttccacgaagtcatgcttgctcactccgcccgacggcatctcagtgcactacaggttctggaaacatgcgtgaagaactgtggacatcgctttcatgtccttgtggcctcgcaggacttcgtggagtcagtgctagtgcggactattctcccaaaaaataatccaccgaccatcgtacatgacaaagtcctgaatctgattcagagctgggccgacgcttttcgctcatcacctgacctgaccggggtggtgacgatatacgaggacttgcggagaaaggggttggagttccctatgacagatttagacatgctttcgcccatccatacccctcagaggacggtcttcaattccgagacacagtccgggcaggattccgtgggtaccgattcctcacagcaggaggactccgggcagcatgcagcgccactccccgcacccccaatactgtctggagatacccctattgcacctacaccagaacagattggcaaacttcggtcggaactggagatggtgagcggaaatgtgagagtcatgagcgaaatgctaaccgagttggtccctacccaagcagagcccgcagatttggagctgctacaggagctgaatagaacctgtcgagctatgcagcagcgtgtgctggaactgatcccccaaatcgctaatgaacagttgacagaagaacttttgatcgttaacgacaacctcaataacgtgtttttgcggcatgaacggttcgaacgtttccgcaccggccagaccaccaaagccccaagcgaggccgagcccgctgcagacttgatcgatatgggtcccgaccccgctgcgacaggcaatttatcgagccagctcgctgggatgaatcttggctcgagttcagtgagggccggtctgcagagccttgaagcatcgggccgtctggaggatgaatttgacatgttcgctctcacgagggggtctagtctggcagaccagaggaaagaggtgaagtatgaagctccccaagccactgatggcctggccggagcgttagacgctaggcaacagtccaccggagccattccagtaacccaggcttgcctgatggaggatattgagcagtggctcagcaccgatgtggggaacgacgctgaagagcccaaaggggttaccagcgaagagttcgacaaattcctggaagagagggccaaggccgcagaccgcctgcccaatctgagctctccttccgctgaagggcctccgggacctccctctggtcctgcacccagaaaaaaaacccaggagaaagacgatgatatgctgtttgcgttatag

SEQ ID NO: 30628 - DNA, 117 bp, synthetic construct
  source 1..117: mol_type = other DNA; note = Synthetic coding sequence
gaacccgtttactttgctgagaaggtgatgtcactggggcgaaactggcacaggccctgtctacggtgccagcggtgtcacaagaccttgactgctggatcccatgccgaggtgtag

SEQ ID NO: 30629 - DNA, 1122 bp, synthetic construct
  source 1..1122: mol_type = other DNA; note = Synthetic coding sequence
atggcacaggagtcccccaagaactctgctgccgaaatcccagtcacaagcaacggggaagttgacgattctcgcgagcattcatttaatagggacctaaaacactcccttccctccggattaggactgtccgagacccaaattaccagccacgggtttgacaacaccaaggagggagttatcgaggctggcgcatttcagggctctcccgcaccacccctcccttctgttatgagtccatctagggtggccgcaagccgtctcgcccagcagggcagcgatctcattgtacctgcaggaggccaaaggacccagaccaagagcgggccagtcattcttgcagacgagatcaaaaacccggcaatggagaagctggaactggtaagaaagtggagtctgaacacttacaagtgcaccagacagatcatcagtgagaaactaggcaggggttccaggactgtggatttggagctggaggcacaaatcgacatcctgcgcgacaataagaagaagtacgagaacatcttaaagcttgcacagacattgagcacccagctgtttcaaatggtgcacacccagagacagttgggggacgccttcgccgatttgtctcttaaaagcttggagctgcacgaagagtttggttataacgccgacacccagaaactgttagccaaaaatggtgagaccctcctgggcgcaatcaatttcttcattgcctcagtgaatacgctcgtgaataagaccattgaagacactttaatgacagtcaaacagtacgagagtgctcgcatcgaatacgatgcatacagaaccgacctcgaagaactgaatttaggcccaagagatgctaatacactgcctaagattgagcagtcgcagcatttgtttcaagcccataaggagaaatatgataaaatgcgcaacgatgtgtccgtaaaacttaaatttctggaggagaacaaagtcaaggtcttgcacaatcagctggtactatttcataatgctattgccgcatactttgcgggaaaccaaaagcagctggaacagaccctgaaacagttccacattaagctgaagaccccaggagtcgatgctccatcttggctcgaagaacagtag

SEQ ID NO: 30630 - DNA, 453 bp, synthetic construct
  source 1..453: mol_type = other DNA; note = Synthetic coding sequence
atgcacacaggcgatcccaagcaagacttggcctatgaacggcaatacgaacagcagacttaccaggtcattcccgaggtgattaagaattttattcagtatttccataagactgttagcgacctgatcgaccagaaggtctacgagctgcaagcctcccgcgtgagcagcgacgtgattgaccagaaggtgtacgaaatccaggacatttatgagaatagctggactaaattgaccgagaggtttttcaagaataccccatggcctgaagccgaggctatagcaccacaggtgggtaacgatgctgtctttctgattctgtacaaggagctgtattacagacacatctacgctaaggtgtctggcggaccctcactggaacaacgctttgagagctactataactactgtaacctgttcaattatatcctcaacgctgatggccctgcctag

SEQ ID NO: 30631 - DNA, 2136 bp, synthetic construct
  source 1..2136: mol_type = other DNA; note = Synthetic coding sequence
atggcaatgcaggagaaatatcctacagaagggatcagtcatgtgacatcaccgaatttttgttcttcaagtggatcccctccgttccagcctattaagtcccatgtcaccatccccaccgctcacgttatgcctagtaccctgggaacttctccagccaagcccaactccacacctgtgggtccatcatcttccaaattgcctctttcaggcttagcagagtccgtaggcatgacacggaatggggacctgggtgcaatgaagcacagccctggactaagtcgcgacttaatgtacttcagtggggcaaccggcgagaacggaatagaacagtcatggttccctgcagtggggcacgaaagacaggaagaggccaggaagtttgacatacccagtatggaatctacactgaaccagagtgcaatgatggagactctctattctgacccgcaccatagggtaaggttccataacccgaggacaagcacatctaaggagctgtacagggtgcttcccgaggcaaagaaggctcccggttctggcgcagtgttcgaaaggaatgggccacactccaactcatcaggtgtgctaccgctagggttgcaacccgctccaggtttgtcgaagccgctgccaagtcaggtgtggcagccatccccagacacttggcaccctagggagcagtcatgcgagctgtccacctgcaggcaacaactggaattgatccggttgcagatggaacagatgcagctccagaatggtgctatctgtcaccacccggctgccttcggtccatccctgccaatcctcgaaccggctcaatggatctcaatcctgaattccaatgagcatctgctgaaagagaaagagcttttgattgacaagcagaggaagcacatctctcagctcgagcaaaaagttcgcgagtccgaactacaggtccactccgccttgctgggaaggcctgcacccttcggtgatgtgtgcttgcttaggctgcaggagcttcagagagaaaacacttttctaagagctcagtttgcccagaaaaccgaggccctcagccgggagaaaatcgatctcgagaagaaacttagcgcgtccgaagtagaagtgcagctcataagagaaagcctaaaggttgccctgcaaaagcattcagaggaagtgaaaaaacaggaggaacgcgtgaagggcagagataaacatatcaacaatcttaagaagaagtgccaaaaagaatccgaacaaaatagggagaaacagcagcgaattgaaacactggaaagatacctggcagatttgccaacccttgaagaccaccagaagcaatcacagcagttgaaagactctgaattaaagtccactgagctgcaggaaaaagtcacagaactggaatctctgctcgaagagactcaagctatctgtagggagaaagagatccagctggagtcccttcgccagagagaggcggagttttcatcagccggtcattctctgcaagataaacagtctgtggaggaaacatcaggagagggacccgaagtcgaaatggagagctggcagaaacgctatgattcgctgcaaaagatagtggaaaaacaacagcagaaaatggaccaactcaggtcccaggtgcagagtcttgagcaggaggtggcacaggaggaggggaccagccaggcgctcagggaagaagcccagaggagggacagtgcgctccagcagctgcgtacagccgtgaaggaactctcagtgcagaaccaggacttaatcgaaaaaaacctcaccctccaagaacaccttcggcaggctcagcccggttccccgccttcgcctgacacggcccagttggctctagagctgcatcaagaactggcctcgtgtttgcaggacctgcaggccgtgtgctcaatagtgacacagcgcgctcaaggccacgatcccaacctctctctgttgttggggatccattcggcacagcaccccgaaacccaactcgacctccagaagccagacgtgattaaacggaagctcgaagaagtgcaacagctaaggcgtgacatagaggatctgaggactaccatgtccgataggtacgcacaggatatgggcgagaattgcgtcacgcagtag

SEQ ID NO: 30632 - DNA, 531 bp, synthetic construct
  source 1..531: mol_type = other DNA; note = Synthetic coding sequence
atggccgctgcaacaggagatccaggcctctctaaattgcagttcgcccctttttcctctgccttggatgtaggattctggcatgaattaactcagaagaagctcaatgagtaccgcttggacgaagcgccaaaggacataaaggggtattactacaatggggatagcgctggactccctgctcggctgactctggaattctcagctttcgatatgtccgcaccaacgccagccagatgttgtccggctatcggaactttgtataacaccaacaccctagagagctttaaaactgcggacaaaaaactcctgctggaacaggccgctaatgaaatttgggagagtatcaaaagcggaactgcattggaaaacccagtcctcttgaacaaattcctgctcctgacattcgcagacctcaagaaataccacttttattactggttctgttatcccgcactgtgtctgcctgagtcactcccactcattcagggacctgtcggcctggaccagcgcttcagtcttaaacaatag

SEQ ID NO: 30633 - DNA, 1443 bp, synthetic construct
  source 1..1443: mol_type = other DNA; note = Synthetic coding sequence
atgaagctgaaggagctggagagaccagccgtgcaggcttggtcccccgcttcacagtatcccttatatttggcaactggaactagcgcccaacaactcgactctagcttctccaccaacgggaccctggaaatcttcgaagttgacttccgcgatccgagtctcgatctgaagcacagaggcgtgctaagcgccctgtcacgctttcacaaactggtgtggggctcttttggctccgggttgctcgagtctagcggcgtgatagtgggcggaggcgacaatggcatgctgattctgtacaacgttacccacatactctcctcaggcaaagagcctgttatcgcccagaagcaaaaacatactggggctgtgcgagcactggatctgaatccctttcagggtaacctactcgcctccggagctagcgactccgaaatctttatctgggatctgaacaatctgaacgtgcccatgactctcggtagtaagtcccagcaaccgcctgaagatataaaggccctatcttggaatcgccaggcccagcacatcctgagttcggctcaccctagcggcaaagccgtcgtttgggatctcaggaaaaacgagccgatcatcaaggtgtccgaccactcaaatcgtatgcattgtagtggtctggcctggcatcctgacatcgctacccagctggtgctctgcagcgaggatgaccgacttccagtaattcagctctgggatcttcgcttcgccagcagtcctctgaaggtactggaaagtcatagccgcggtatcctgtccgtgagctggtcacaggcggacgccgaactgcttctgacatcagccaaggactcccagattctgtgccgcaacttgggtagttcagaggtggtgtacaagctgccgacccagtcctcatggtgctttgacgtacagtggtgcccccgtgatcctagcgttttctccgccgcttcgttcaatggatggatctcattgtacagcgtcatgggaagatcctgggaggtccagcatatgagacaggcagataaaatctcgtcttccttctcaaagggtcagccacttcccccactgcaagtgcctgagcaagtggcacaggcccctctaattcctcctttgaagaagcccccaaagtggattcgcaggcccaccggcgtttcattcgcttttgggggaaaactggtgactttcggcctcccttcaactcccgcacacctggtaccacaaccatgtcccaggctggtgtttatctctcaggtgaccacagaatcagagttcctgatgcgcagcgccgaattacaagaggcactgggaagcggaaatttactgaattactgccagaacaagtcccagcaggcacttctccaaagtgagaaaatgctttggcagttcctgaagcctgcacgagactcgagcggcgctcgtcgctag

SEQ ID NO: 30634 - DNA, 1842 bp, synthetic construct
  source 1..1842: mol_type = other DNA; note = Synthetic coding sequence
atggcaaccataccggactggaaactacagctattggccagaaggcgtcaggaagaggcgagcgtgagaggcagggaaaaggccgagcgcgagagactgtctcagatgcctgcctggaagaggggcctgctggagaggcgcagggccaaactggggttgtcacctggggagcccagtccggtcctggggactgtggaagccggacctccagaccccgatgagtctgctgtcctgctcgaggctatcggccctgttcaccaaaacagattcataaggcaggagcgacagcaacaacagcagcagcagcagcggtccgaggaattacttgccgaaaggaagcctggcccactggaggctcgagagcgacggccttcaccgggagaaatgagggatcagagccccaaagggcgtgaaagtagagaggagcgactaagtccgcgagagactcgagagcgccgtctgggaattgggggagctcaggagctatcattacgtccattggaagctcgtgactggaggcagtctccaggcgaagtcggcgacagaagcagccggctgtcagaggcctggaagtggagactgagcccaggcgaaacacctgaacgatccttacggctcgccgaatccagagagcagtccccccgtcgaaaggaagtcgaaagtcggcttagtcccggtgagagcgcctatcagaaactcgggttgaccgaagcccacaaatggcgaccagactctcgagagtcacaggaacagtccctagtgcaattagaggcaacggaatggcgcctccgctctggagaggaacggcaagattattctgaagaatgcggcaggaaggaagaatggcctgtgcccggagtcgctccgaaagaaacagcagaactctccgaaacattgacccgtgaggcacaaggtaatagcagcgccggagtggaggctgcagagcagcgacccgtggaagacggggagagagggatgaaacctaccgaggggtggaaatggactctgaactctgggaaggcgagggagtggacccctcgggatatcgaggcacagacccagaagcctgaaccacctgagtctgcggagaagcttttggaatccccaggagtggaggccggagagggcgaggcggagaaggaggaagctggggctcagggtcgccctctgagagctttgcagaattgctgttccgtccctagtccacttccccctgaggacgcaggaactgggggactgcgccagcaggaagaggaagcagtggagttgcagcctcctcctcctgcgcctctgagccctccccctcccgcaccgacggcaccacaaccccctggggatcctcttatgagcaggttattttacggcgtcaaagctggacctggtgtgggggcaccaaggaggagcgggcatacctttaccgtcaatccaaggaggagtgtgccacccgcaaccccggctacacccacaagccccgcaacagttgacgcggctgtgcccggagccggaaaaaaacgctaccctactgctgaggaaatcctggtgctaggaggctatctcaggctcagccgtagctgcctagctaagggttcccctgagcggcaccacaagcagctgaagatctccttttcagagactgccctagaaaccacctaccagtacccctccgagtcctccgtactcgaagagcttggaccagaacctgaagtgcctagcgctcctaacccccctgccgcacagcccgacgacgaagaagatgaagaggagctgttactgttgcagcccgaattgcagggcggtctgagaacaaaggctctgattgtagacgagtcatgccgacggtag

SEQ ID NO: 30635 - DNA, 1446 bp, synthetic construct
  source 1..1446: mol_type = other DNA; note = Synthetic coding sequence
atggctagcgctgcttctgttacctctcttgcagacgaagtgaattgcccaatctgccagggcactctccgggaacccgtgactatcgactgtggccataatttctgtcgcgcatgcctcacaagatattgcgagatccctggaccagatctcgaggagtctcccacctgtccactgtgcaaagaacctttccgcccaggatccttccggccaaactggcagctagcaaatgtggtcgagaacatcgaaaggctgcaactggtttccacattggggctgggcgaagaagacgtgtgtcaagagcatggcgaaaagatctatttcttttgcgaggacgatgagatgcagttgtgcgttgtctgccgggaggccggagaacatgccacacatacaatgagatttctggaggacgccgcagcaccctacagagagcagattcacaaatgcctaaagtgtttgcgcaaagaaagagaggaaatccaggagatacagagtcgggaaaacaaacgaatgcaggtcctcctgacacaagtatccaccaaacgtcagcaagtcattagtgaattcgctcatctacgtaaatttttggaagaacagcaatctattctcctagcccaactcgagagccaggacggtgacatcctccgtcagcgagacgaattcgacctgctcgtagccggagagatatgtaggtttagtgcattgatagaagagctggaggagaagaatgaacggccagccagagagttgctgactgacattaggagtacactgatccggtgcgaaaccaggaagtgccggaagccggtggccgtttccccagaacttggacagagaattagagattttccacagcaggcccttccccttcagagggagatgaagatgttcctggagaagttgtgtttcgagcttgattatgagcccgctcatatttcactcgacccgcagacctcccacccgaagctgcttttaagtgaggaccatcagagagcccagttctcttataaatggcagaacagccccgataaccctcaaaggttcgacagagccacatgtgtgttagctcacaccggcataactggtggacgacacacctgggttgtgagcattgacctagcacatggagggagttgtaccgtgggcgtagtgagcgaagacgtgcagcggaagggtgaactgcggttgaggcccgaggagggcgtgtgggccgtgcgtctcgcatggggcttcgtgtccgccctgggcagcttccctactaggctgacacttaaagaacagccacggcaggtccgggtcagcctcgactatgaagtgggatgggtaaccttcactaatgccgtgacaagagagcctatttatacgttcactgctagctttactaggaaggtgatcccgtttttcgggctgtggggtaggggctcttccttttccctgagtagctag

SEQ ID NO: 30636 - DNA, 537 bp, synthetic construct
  source 1..537: mol_type = other DNA; note = Synthetic coding sequence
atgtcgagtaatgagtgcttcaagtgtgggcgtagcggacattgggcacgggaatgccctaccgggggaggccgtgggagggggatgcggagcaggggaaggggcggttttacttccgataggggctttcagtttgtgtcctcctcactccccgatatttgctacaggtgcggggaatccggacatttggctaaagattgcgatctacaagaggatgaagcctgctacaattgcggtcggggtggacacatagccaaagattgcaaagaacctaaacgtgaaagagaacagtgctgttacaattgtggaaaaccgggtcatctggcccgagactgtgaccacgccgacgaacagaaatgctatagctgcggagaattcggccatatccaaaaggactgcacgaaagtgaagtgctataggtgcggcgagacaggacacgtggcgatcaactgttccaaaacctctgaagttaattgctatagatgtggagaatcaggtcacctggcgagggagtgcacgattgaagccacagcatag

SEQ ID NO: 30637 - DNA, 87 bp, synthetic construct
  source 1..87: mol_type = other DNA; note = Synthetic coding sequence
atggcaatggctccttcgccaagtctagtgcaggtgtacacaagtccagctgccgtagccgtgtgggaatggcaggatgggctctag

SEQ ID NO: 30638 - DNA, 603 bp, synthetic construct
  source 1..603: mol_type = other DNA; note = Synthetic coding sequence
atggctgccactgctcgtgaggatggggcttccggccaggaacgtggtcagagaggttgtgaacactacgaccgcggatgcctgctcaaggcaccatgctgtgacaagctctatacctgtcgattgtgccatgataataatgaagaccaccagcttgatcggtttaaagtgaaggaggtacagtgtattaactgtgagaagatacagcatgcacagcagacctgtgaagagtgtagcacattattcggtgagtactattgcgacatctgtcacctgtttgacaaggataaaaagcagtaccactgcgagaattgcggaatatgtcggattggacctaaagaggacttcttccactgtctgaaatgcaacctgtgcctggctatgaatctccaaggacgacataagtgcattgaaaatgtgtcgcgacagaactgcccaatttgcctggaagatatccatacttcacgcgtggtagctcacgttctgccctgcggacatttgctgcatcgcacctgctatgaagagatgcttaaggaattgcagatgagtataatgtatgctttgtgttttagatatgaccaggttctggaaacggcaggttag

SEQ ID NO: 30639 - DNA, 567 bp, synthetic construct
  source 1..567: mol_type = other DNA; note = Synthetic coding sequence
atggcaacgccactcgggtggagtaaggcaggatcgggttctgtatgtttagccttagaccaacttagagatgttattgagtctcaggaagagctgattcaccagctgcgaaacgtgatggtgcttcaggatgaaaatttcgtgagcaaggaagaattccaagctgttgaaaaaaagctggttgaggagaaggccgctcatgccaaaaccaaagtgctgctggcaaaggaggaggagaaactgcaattcgctctgggcgaagtcgaagttctcagtaaacagctggagaaggaaaagctcgccttcgagaaggctctgtctagtgttaagtcaaaagtactacaagaaagttcaaagaaggaccaattgattactaagtgcaacggcaggcgcgaggcacgggcactgcatcatggatacataaacggcctgttcccgaatcaccccgtccctgtatccaaagctgggttccacagcaacacttgcccacaacttcgaattcaggccggtcctggcggaccccacctgaggaaagggctgaaagggccaggaaggccgaggaagtag

SEQ ID NO: 30640 - DNA, 381 bp, synthetic construct
  source 1..381: mol_type = other DNA; note = Synthetic coding sequence
atggacagatcaaaacggaatagcatcgccggatttccacctcgtgtcgagcgactcgaggaatttgaggggggaggagggggagaggggaatgtgagccaggtcggtcgagtgtggcctagtagctaccgcgctcttatctccgcattttctcgactgacccgcctggatgacttcacatgcgaaaaaatcggcagcgggttcttctcagaggtcttcaaagtcaggcacagagcctctggacaagtgatggcattaaagatgaacactctgagcagtaatagagccaatatgcttaaagaggtgcagctgatgaacagactgtcccaccctaacatcctgaggtgtagatccatgaatcagaatttcagtccaaattag

SEQ ID NO: 30641 - DNA, 1443 bp, synthetic construct
  source 1..1443: mol_type = other DNA; note = Synthetic coding sequence
atggagacagatctgaattcgcaggatagaaaggatttggataaattcattaagtttttcgccctgaaaactgtccaagtgattgtgcaggcaagactcggtgaaaaaatctgcacccgttcctcctccagcccaaccgggtccgactggttcaatcttgctatcaaagatattccggaggttactcacgaggcgaaaaaggcgctcgccggacagctgcctgcggttggacggagcatgtgtgtggagatctctctaaagacaagtgagggcgattcaatggaactggagatctggtgcctggagatgaacgagaaatgcgataaagagattaaggtcagctacacggtgtataatcggctatcgctgctcctcaaatctctgttggccattacccgggtaacccctgcatatagactcagcagaaagcagggtcacgagtatgtcatcctttatcgtatctattttggggaggttcagttatcaggcctgggcgaggggtttcagacagtcagagttggaacggtggggaccccggttggaactattaccctatcttgcgcatatcgaattaacctggcctttatgtccacaagacaattcgaaagaacacctcccattatgggcatcatcatcgatcattttgtcgatagaccttaccctagtagctctcccatgcacccttgtaattatcggactgccggagaggacactggcgtgatctacccgagcgtggaagacagccaggaagtctgtacaacctcgttctcgacttcgcctccttcgcagttaatggttcccggaaaagagggcggagtgcctctggcacccaaccaaccggtgcacggaacacaggcggaccaggaaagactagccacatgcaccccctcagacaggactcactgcgccgctacgccttcaagcagcgaagacacagagacggtgtctaactcctcggaaggacgggcaagccctcacgatgtgctcgagacaattttcgtgaggaaggtgggtgcattcgtcaacaagccaatcaaccaggttaccctcacatcgctggatattccattcgctatgttcgccccaaagaacttggagttggaggacactgacccaatggtaaacccccctgatagtccagagacagaatctccactgcaaggatcgttacactctgacgggagcagtggaggctcatctggcaacacccatgacgactttgtgatgattgactttaaacctgcgttctctaaggatgacatacttccaatggatctggggacattctacagggaatttcaaaatccccctcagctcagttccctctcaattgatatcggtgcacaaagcatggccgaggatttggacagcctgcccgaaaagctggctgtacacgagaaaaatgtacgcgagtttgacgccttcgtggagaccctgcaatag

SEQ ID NO: 30642 - DNA, 390 bp, synthetic construct
  source 1..390: mol_type = other DNA; note = Synthetic coding sequence
atggccgagctgatccagaaaaaacttcagggggaggttgagaaataccagcagctgcaaaaagacctctccaaatctatgtcgggccgtcagaagctggaagcccagcttactgagaataacatcgtgaaggaggagctggccctcctagacggaagcaacgtcgtgttcaagttgctcggtcccgtgctggtaaagcaggagttaggcgaagcgagggcaaccgtcggtaagcgactcgattacattactgcagaaatcaagagatatgagtctcagctcagagatctggaaagacagagcgaacagcaacgggagaccctggcacagctccagcaggagttccagcgagctcaggccgcaaaggcaggggcacccggaaaagcatag

SEQ ID NO: 30643 - DNA, 348 bp, synthetic construct
  source 1..348: mol_type = other DNA; note = Synthetic coding sequence
atggtggaggacgaattagccctgttcgacaaaagtatcaatgagttttggaataagtttaaatcaactgatacatcatgtcaaatggccggattacgcgacacctataaagacagcattaaagcattcgccgagaaactctcagtcaagctgaaggaagaggaacgcatggtagagatgttcctggagtatcaaaatcaaatcagtcgccagaataagctcatccaggagaagaaagacaacctgctcaaactgattgcggaagtcaaagggaaaaagcaggagctggaggttctgaccgcaaatattcaggacctaaaggaggaatactcacggaagaaggaatag

SEQ ID NO: 30644 - DNA, 402 bp, synthetic construct
  source 1..402: mol_type = other DNA; note = Synthetic coding sequence
atggccagcagtgccagggagcatctgttattcgtgcgaaggcgcaatccccaaatgcgatatacattaagtccggaaaacctacaatcgctcgccgcacagagctctatgccagaaaatatgaccctgcagagagccaatagtgacactgacctcgtgacttccgaaagccgctcaagtctcacagcctcaatgtatgagtacactctaggtcaggctcagaatctcattatcttctgggatatcaaggaagaagtagatccctctgactggatagggctctaccatattgatgagaactcacccgctaacttttgggactccaagaacaggggggtgactggcacccaaaaaggtcagattgtgtggagaattgagcctggcccttacttcatggagtag

SEQ ID NO: 30645 - DNA, 264 bp, synthetic construct
  source 1..264: mol_type = other DNA; note = Synthetic coding sequence
atgtcactattcggaacgacgtccgggtttggtacgtctggtacaagcatgtttggctcagccaccaccgataaccacaaccccatgaaagacattgaagtaacttcctcgccggacgattctatcgggtgtctcagcttttcaccacccacgctgccaggtaactttcttatcgcaggttcctgggccaacgatgtaaggtgctgggaggtgcaggatagcggacagactattcccaaagcacaacagatgcacaccggatag

SEQ ID NO: 30646 - DNA, 1329 bp, synthetic construct
  source 1..1329: mol_type = other DNA; note = Synthetic coding sequence
atggccaacagtttcgccgctaggatctttaccactctgtctgacctccaaacaaatatggccaatctgaaagtaattggtatcgtgattggaaaaacagatgttaaaggtttccctgaccggaaatccattggctctgagaggtatacgttttcctttaccatcagagactctccagcacattttgtaaatgccgctagttggggcaacgaagattacattaagtctctctccgatagctttagagttggagactgcgtcatcatcgagaaccctctcattcagcgcaaagagattgaaagggaagaaaaattcagccctgccactcccagtaattgtaagctgcttctgagcgaaaatcactcaaccgtcaaagtatgctcctcgtacgaggtagacacgaagttgctgagtctgatccacctgcccgttaaagaatcccacgactattacagtctgggcgacatcgtggctaacgggcatagcttaaacggaaggatcatcaacgtcctcgctgcggtgaagagcgtcggggagcccaagtacttcacaacttcggaccgaagaaaaggacagagatgtgaggtgagactctacgacgaaacagaaagtagctttgcaatgacttgttgggataacgaaagtattcttctggcccagtcttggatgcccagagaaaccgtgatctttgcgagcgacgtaaggatcaacttcgacaaatttcgcaattgtatgacagctaccgtgatcagtaaaactataattacgactaacccagatattccagaagccaatattctgctcaatttcattagagagaacaaggagactaacgtgctcgacgatgagatcgacagctactttaaggagtctattaatctcagtactatagttgacgtgtataccgtagagcagctgaaaggtaaagcactaaaaaatgaaggtaaagccgacccaagttacggtatcctctatgcctatatttctacactgaacatcgacgacgagacaaccaaagtagtccgcaatcgttgctcctcctgcggttatattgttaacgaggcttccaacatgtgcaccacatgtaacaagaactctctcgattttaagagcgttttcctgagttttcatgtactgatcgacctcacagaccatacagggacactccatagttgttctctgaccggctcagttgccgaagaaacactgggatgcacattcgtgctctctcaccgagctcgctccggcctgaagatctcagttttaagttgtaagctggcggatcctaccgaggccagtaggaacctgtcaggccagaaacacgtttag

SEQ ID NO: 30647 - DNA, 651 bp, synthetic construct
  source 1..651: mol_type = other DNA; note = Synthetic coding sequence
atgaacaaccagaaacagcaaaaacccacattatccggccagagatttaaaacccggaagcgtgacgagaaagaacgctttgaccctacacaattccaggattgtattattcaggggctcaccgaaaccggcacagatttagaggccgttgccaagtttttagacgccagcggcgctaaactggattaccggaggtatgcagagaccctattcgatattcttgtggcagggggaatgctggctccgggaggtactctggccgacgatatgatgagaacggatgtctgcgtgttcgccgctcaggaggatttggaaacgatgcaggcctttgctcaagtctttaataaactcatccgaaggtataaatacctggagaaggggtttgaggacgaggtaaaaaagctcctgctctttctgaagggattctctgaaagtgagcgaaacaaacttgcaatgctaactggagtgctgctggccaacggaacactcaacgccagcatcctaaattccctgtataacgaaaatctcgtgaaggagggggtttctgccgctttcgcagtgaagctttttaagtcttggataaacgagaaggacattaatgcagtggcagccagcttaaggaaagtgtctatggacaaccgtctgatgtag

SEQ ID NO: 30648 - DNA, 429 bp, synthetic construct
  source 1..429: mol_type = other DNA; note = Synthetic coding sequence
atgaatgaggtggtgcacaccagtcctactataggaagtaacgtggaggagatcgtgatcaacaataccaggttccttatgtgggacattggaggccaggaatcactccggagctcatggaatacctattacaccaacactgaatttgtcattgtcgtagtggactccacagatagggagcgaatttcagtaactagagaggaactttacaaaatgctggcgcatgaggatctcaggaaagccggactactcatctttgccaacaaacaggacgtgaaggaatgcatgacagtcgccgagatcagccagtttctgaagttgacaagtattaaggaccaccagtggcacatccaagcctgctgtgcactgacgggcgagggactttgtcagggactagagtggatgatgagtaggttgaaaatccgctag

SEQ ID NO: 30649 - DNA, 447 bp, synthetic construct
  source 1..447: mol_type = other DNA; note = Synthetic coding sequence
gccattcacatcctggacgtcctggtgttgaatggcaccgacgtccgggagcagcacttcaaccagcgcatacaactggctgagaagttcgtcaaagcagtgtcaaagcctagccggccagacatgaaccctattcgagtgaaggaagtctatagactggaggagatggaaaaaatattcgtgcggctggaaatgaaaatcatcaagggatcgagcggcactcccaagctgtcatatacaggtcgggatgacagacatttcgtgcccatgggcctctatattgttcgtaccgtgaatgaaccctggacgatggggttctccaagagctttaagaagaagttcttctataacaagaagactaaggattccacttttgacctcccctattatccatttccaagctttttttttccaaatcgccgatacaatttgctgttgtttgtgtag

SEQ ID NO: 30650 - DNA, 300 bp, synthetic construct
  source 1..300: mol_type = other DNA; note = Synthetic coding sequence
atggaggagattcccgctcaggaggccgcaggcagtccacgcgtacagtttcagtcacttgagacccagtctgagtgtctcagccccgagccacagtttgtgcaggatacagacatggagcagggcttgactggcggtatactgctgagacttccaactaccaggatacacagcgtgaattcatgcccagcgctctctcacacccaggcttcagccttctccggagagaccctggccgtactgaccgcaggaatcagcaaaaggtggccaaagtatagactgcccatagacattgcctag

SEQ ID NO: 30651 - DNA, 2493 bp, synthetic construct
  source 1..2493: mol_type = other DNA; note = Synthetic coding sequence
atgaagcggggacggctcccctcatccagcgaagattccgacgataacggatctctgagcacaacatggtctcagaacagcagaagtcagcataggcgttcttcctgctcgcgacacgaagaccgcaagccctctgaggtgttccgtaccgatctgattacagctatgaagctgcacgattcctaccaactaaaccccgatgagtattatgtgttagccgatccttggcgacaggagtgggagaagggagtccaagtccccgtcagtccgggtacaattcctcagccggttgctcgccctaaaaagtacattgttagttcagggagtgagccacccgagctgggttacgtggatatcagaaccctggccgattccgtttgccggtacgatctcaatgatatggacgcagcatggctagagctaactaatgaggaattcaaggagatgggcatgcccgagctcgacgaatatactatggagagagtactcgaggaatttgagcaacgctgttacgataacatgaaccacgctattgaaactgaagagggcctgggaatcgaatatgatgaagacgtggtatgtgacgtctgtcagtcgcctgacggggaggacggcaatgaaatggtcttctgcgataagtgcaatatctgcgttcaccaggcttgctacggaatactgaaagtgccagaggggagctggctgtgccgcacatgtgctctcggtgtacagcccaagtgcttgctgtgcccaaaaaaaggaggagctatgaaacccacccgctctggaactaaatgggtgcacgtgtcgtgtgcgctgtggatccctgaagtcagtataggatctcctgagaaaatggaaccaattacaaaagtcagccacatccccagcagcagatgggccctggtgtgctctctgtgcaatgagaaatttggggcatcgatccaatgctcagtgaaaaactgcagaactgcatttcatgttacctgcgcgtttgacagaggattggaaatgaaaacgatcttggctgagaatgacgaggtcaaatttaagtcctattgccccaaacatagcagtcaccgcaagcccgaagaaagtctgggtaagggcgcagcccaggagaatggcgctcccgagtgctcccctcggaatccgttggagccctttgcctccctagagcaaaacagggaagaagcgcaccgggtctcagtgaggaagcaaaaactccagcagctggaagacgaattctacacctttgttaatctgctggacgtggcaagggccctccgcctcccagaggaggttgtggacttcctgtatcagtattggaagcttaagcgcaaggttaactttaataaaccgttgatcacgccaaaaaaggacgaagaggataatcttgcaaagcgcgagcaggacgtccttttccggcgtctgcaactgtttacccatctgcggcaagacctggagagggtgcggaacctgacttatatggtaacccgtagggagaaaatcaagcggtccgtatgcaaggtgcaggaacaaatctttaacctttacacgaagctccttgagcaagaacgcgttagcggagttccttcctcctgctcctctagctctctggagaacatgctcctattcaattcgccatcagtggggccagacgcacccaagattgaggatctgaaatggcactccgccttcttccgcaaacagatgggtactagcctggtgcattcgctgaagaaacctcacaaacgtgatcccctccaaaattcccctggctcagaagggaaaacattgctcaagcaacctgacttgtgtggacggcgtgaagggatggtcgttccagagtcttttttgggcttagaaaagactttcgcggaggcgcgtctgatcagcgcacagcagaagaatggggtcgtgatgcctgatcacggcaagagaagggataatcgctttcattgcgacttgattaaaggagatctgaaagataagtccttcaaacaatcacataaaccactgcgaagtacagatgtctcccagagacatctggacaacactagagcagctacatcccccggagtgggccaatctgctccgggaactcggaaggagatcgtgcctaaatgtaatggaagcctcattaaagtgaactacaatcagaccgccgtcaaagtgccaaccactcctgctagcccagtcaagaattggggcggattccggatccccaagaaaggagagcgtcagcagcaaggcgaggcacatgacggggcttgtcatcagcattcagactacccctatttaggtcttggacgcgttccagcaaaggaacgggcaaaaagtaaattgaaaagcgataacgagaatgatgggtatgtgcctgacgtagaaatgagcgattcagagtcagaggccagcgaaaagaagtgtatccatacctcctccaccatctcacggagaaccgatataatccgaagatctatcctggcttcctag

SEQ ID NO: 30652 - DNA, 402 bp, synthetic construct
  source 1..402: mol_type = other DNA; note = Synthetic coding sequence
atggcctccgaagatattgccaagctggcggagaccctggcaaagacccaggtggcaggcggtcagctcagcttcaagggcaagtctcttaagctgaacacagccgaggacgctaaagatgtgattaaagaaattgaggattttgactcactcgaggctctccggttggaaggtaataccgtcggcgttgaggctgccagagtaattgctaaagcgttagaaaaaaaaagcgaactgaaaaggtgtcattggtcagatatgttcactggccgtctgcggaccgagatccccccagctctgatatctttgggagaggggctcattactgcaggagcacaactggtggagctcgacctttctgataatgctttcggtcctgacggagtgcagggctttgagtag

SEQ ID NO: 30653 - DNA, 390 bp, synthetic construct
  source 1..390: mol_type = other DNA; note = Synthetic coding sequence
atgagtcccggatcaggcgttaaatcagaatacatgaaacggtatcaggagccaagatgggaggagtacggcccatgctaccgggagctcctgcattacagactagggcgacgtctgcttgagcaggcacatgccccatggttgtgggacgattggggcccagctggctcttccgaagactcagcatctagtgagtcaagcggtgccggaggacccgcacccagatgtgcgccacccagccctcctcctcctgttgaacccgctacccaagaggaggccgaaaggcgggcaaggggcgcacccgaggaacaggatgccgaagccggtgatgctgaagctgaggacgcagaggacgctgcccttcccggaaatgcctggctcagaacctag

SEQ ID NO: 30654 - DNA, 390 bp, synthetic construct
  source 1..390: mol_type = other DNA; note = Synthetic coding sequence
atggcagaattaattcagaaaaaactccagggggaggtggagaagtaccagcagttgcagaaggatctgagcaagagtatgtccggcagacagaagctggaggcccagctcacagaaaacaatattgtgaaagaggagttggccctcctggatggctcgaacgttgtgtttaagctgctgggtccagtcctcgtgaaacaggaactgggcgaagctcgcgctacagtgggaaaaagattggattacatcaccgcagagataaaacgatacgaaagtcaactcagggacctcgagagacagagcgaacagcagcgcgaaacattggcacaactgcagcaagaattccagcgggcacaggcagcaaaggccggagcacctggcaaggcctag

SEQ ID NO: 30655 - DNA, 402 bp, synthetic construct
  source 1..402: mol_type = other DNA; note = Synthetic coding sequence
atggctgagaaacttattacacaaaccttcagtcaccataatcagctcgcccaaaagacccgccgagaaaagcgcgctcgacaggaagccgagagaagggagaaggccgaaagagccgctcgcctcgcaaaggaagcaaaaagcgaaactagtggacctcaaattaaagagctgactgatgaagaggcagagcggctacagctggagatcgaccagaaaaaggacgcagagaaccatgaggctcagctgaagaatgggtcactggactcaccgggaaagcaagatactgaggaagatgaggaggaggacgaaaaggataaaggtaaacttaagccaaatttaggcaacggagccgacctccccaattatcggtggacacagaccctgtccgagctggactag

SEQ ID NO: 30656 - DNA, 2373 bp, synthetic construct
  source 1..2373: mol_type = other DNA; note = Synthetic coding sequence
atggggacccgtaaaaaggtacacgcatttgtgcgcgtaaaacccacagacgacttcgctcatgaaatgattcggtacggtgatgacaaaaggagtattgacattcacctcaaaaaggatatacggcgtggggtcgtaaacaatcagcagacagattggtctttcaagctggacggagtcctgcacgatgctagtcaggatctcgtgtacgagaccgtagccaaagacgtggtgtcccaggccctggatggctacaacggcactataatgtgctacgggcagacgggagccggtaaaacatacacaatgatgggagcaaccgagaactataaacatagaggtatactaccacgtgccctgcagcaggtttttaggatgatagaagagagacccacccacgcaatcaccgtgagggtaagttatctggaaatatataacgagtccctattcgatctactttctactctcccgtatgtaggcccttctgtgactcccatgacaatcgttgagaacccccagggagtttttatcaaagggcttagcgtccacctgacctctcaggaagaggacgccttctccctactctttgagggtgagacgaaccgcatcatcgcatctcatactatgaacaaaaactcttcgcgctcacattgcattttcaccatctatctcgaagctcacagccgcacgcttagcgaggagaaatatatcacctctaaaattaatctggtggacctggcgggatccgagagattgggcaagtcggggtctgaaggccaggtactaaaagaggccacatacatcaataaaagcctctccttcctggaacaggcaataatcgcccttggtgaccagaagagggaccacattccattcaggcagtgcaagttaactcatgctctgaaggactctctgggcggaaattgcaacatggttttggtgactaatatttacggagaagcagcccaacttgaagaaaccttatcttcattgcgatttgcgagcaggatgaagctagtgacaaccgaacccgctatcaacgaaaagtacgacgcggaacgcatggtgaaaaatctcgaaaaggagctcgccttgctaaaacaggagttagcaattcatgattccctgacaaaccggacattcgttacttatgatcctatggacgaaatccaaatcgctgaaattaatagccaagtgagacgataccttgaggggaccctcgacgagattgatatcatttcactccgacagataaaggaggtttttaaccagtttcgagttgtcctgagtcagcaggaacaagaggttgaaagtacgctccggaggaaatacacgctgattgaccgaaacgactttgcggcaatctctgcaatccaaaaagccggtctcgtggacgtggatggccatttagtgggcgagcccgaggggcaaaacttcggcttgggagtagccccattctcaaccaaacctgggaaaaaggctaaatctaaaaagactttcaaggagccgttgagctccttggctcgtaaagagggggcttcatcccctgtcaacggaaaagatctcgactatgtgtcaaccagcaagactcagctcgtcccttccagcaaggatggcgatgtaaaagatatgctatcgcgcgacagggagacttccagcattgagcctcttccgtccgacagccccaaagaggaactgcggccaatcagacctgatacaccgccatccaaacctgtcgctttcgaggagtttaaaaatgagcagggctccgagatcaatcgaatttttaaggagaacaagtcaatcctcaatgagcggagaaaacgggctagcgagacgacacagcacatcaacgccattaaaagggaaattgatgtaacaaaggaggccctgaattttcagaagagcttacgcgaaaagcaaggaaagtatgaaaataaaggactcatgatcattgatgaagaagagttcctactcatcctgaaactcaaggaccttaagaagcaatatagatccgaataccaggatttgcgggacctgcgagcagaaatccagtactgccagcaccttgtcgatcaatgtcggcatcgactgctcatggaattcgacatttggtataacgagagctttgtcattcctgaagacatgcagatggcccttaagccaggaggaagtatcagacctggcatggtgcctgtgaatagaatcgtgtcgctaggtgaagacgatcaagataaattcagccagctccaacagcgggtgctgcctgagggaccagattccatatctttctataacgcaaaagtgaaaattgagcagaaacataactatctgaaaacaatgatgggcctgcagcaggcccaccggaaatag

SEQ ID NO: 30657 - DNA, 1356 bp, synthetic construct
  source 1..1356: mol_type = other DNA; note = Synthetic coding sequence
atgtatggcgcacccggtgctccagctcagtctgcgagtgtgaccgtggtgaggtctcttcgaagaccacccccacaggccactggcgtttccttcatgaacaatcaaaaacagcagaaacccaccctatccggacagcgatttaagacccgtaagcgtgacgagaaagagcggttcgatcctacccagtttcaagactgtataattcagggtcttactgagaccgggacggacctggaggccgttgccaagtttcttgatgcaagcggagccaagctggactacagaagatatgccgagaccctgttcgatattctcgtggccggtgggatgctggccccagggggtacgctggccgatgacatgatgagaactgacgtgtgcgttttcgccgctcaggaggatctggagacaatgcaggcatttgcacaggtctttaataaactgatcagaaggtataaatatttggaaaaagggtttgaggacgaagtcaagaagttactcctgtttctcaaaggcttctccgagagcgagcggaacaaattagcaatgttgactggagtactgcttgccaatggaacgttaaatgcaagtattctcaatagcttatacaatgagaatttggtcaaagagggggtctccgcagccttcgcagtgaagctttttaagtcctggattaacgaaaaggacatcaacgcagtggcggcaagtctccgaaaggttagcatggacaacaggcttatggagctgtttcccgctaataagcagagcgtcgaacactttactaagtacttcactgaggctggtctgaaggagctaagcgaatacgtccgcaatcagcagactatcggggctcgtaaggaactgcagaaggagctgcaggaacaaatgagtcgcggagacccattcaaggatatcattctgtacgtgaaggaggagatgaaaaagaataatatccccgagcctgtggttatcggcatcgtctggtcatctgtcatgagcacggtcgaatggaacaagaaagaggagctggtcgccgagcaggctattaagcaccttaagcagtattcacccctcctggccgcattcaccacccagggccagagcgaattgacccttctgttgaaaatacaggagtattgttacgacaatatccattttatgaaagcttttcagaagattgtggtcctcttctacaaagcggaagtgctatccgaggagccaatcttaaaatggtacaaagatgcccacgtggccaaaggcaagtctgtgtttctggagcagatgaagaagttcgtggagtggcttaagaatgctgaagaggaaagcgaaagtgaagccgaagagggcgactag

SEQ ID NO: 30658 - DNA, 948 bp, synthetic construct
  source 1..948: mol_type = other DNA; note = Synthetic coding sequence
atggccggaggagcaagggaagtactaactctgcagctgggtcactttgctggttttgtcggtgctcactggtggaaccagcaggacgcggcactgggccgagcaacagattctaaggaacctcctggtgaattgtgtccagacgtgctgtataggacagggagaactctccatggccaggaaacttatacacctagactgattctgatggatctgaagggctcactttcatctcttaaggaagagggcggactatacagagacaagcagctggacgctgcaatcgcttggcaaggtaaattgactactcataaggaagaactctaccccaagaatccctatctacaggacttcttgtcagccgaaggggttttatcttccgacggggtttggcgcgtcaaatcgatccccaacggcaagggttcttcacccctccctaccgcaactactccaaagcctcttattccaacagaggcctccattcgagtgtggagcgacttccttcgggtccatctgcaccccaggagtatatgcatgattcagaaatacaatcacgatggcgaggccggtcgcctggaggcttttgggcagggggagagcgtgctaaaagaacctaagtaccaggaagaactcgaagacagactacacttctacgtcgaagaatgcgactatctccaggtggttgcttggcagtgcgcgcttcaaggaggatctagctcacacccagctaattatttgtctagtctgaccccagcccagggatttcagatcctgtgtgatctgcacgacggcttttcaggggtgggcgctaaagctgcagagctgctacaggacgaatattctggccgaggtatcataacctggggacttcttcccggaccctaccatcgcggtgtgtcgggaacttggcgctccaagcattctaatccgataggcagagtcgcatag

SEQ ID NO: 30659 - DNA, 285 bp, synthetic construct
  source 1..285: mol_type = other DNA; note = Synthetic coding sequence
tgtacttctagttgtacaccgtcctgctgtcaacagtccagctgtcagccggcttgttgtacatccagcccttgccagcaagcttgctgtgttcctgtctgttgtaaaacggtatgctgtaagccgtcctcctgtcaaccagcttgttgtatcagttccccatgtcagcagtcttgttgcgttccagtgtgctgtaagcccatttgttgtgtcccaccagcctgctgtaccacctcatgctgccggccttctagtagcgtgagtctgctctgtagaccagtgtag

SEQ ID NO: 30660 - DNA, 1221 bp, synthetic construct
  source 1..1221: mol_type = other DNA; note = Synthetic coding sequence
atggccgctaacctcagccggaatggccctgctttgcaggaggcctatgtgcgcgtcgtgacggagaagtctccaacagactgggccctttttacatacgaaggcaacagcaacgatatacgcgtggccggaacgggtgagggagggctggaggaaatggtcgaggagttaaatagcgggaaggtaatgtacgccttttgtagagtgaaggacccaaacagtggcctgcccaaattcgtcctgataaattggggagcacacgtgactatcaacgcacgggctgaagaggacgtggaaccggagtgcattatggaaaaggtcgcaaaggccagcggtgctaactactcttttcataaggagagcgggagattccaggatgtgggaccacaggcccctgtgggatccgtctaccaaaaaacgaatgccgtcagcgaaattaaacgcgtaggcaaggacagcttctgggctaaggctgaaaaagaggaggagaacagacgtctcgaggagaagcgaagggccgaagaagctcagagacagttagaacaggagcggcgagaaagggaactgcgagaggctgcaaggagagagcaaaggtaccaggaacaaggcggagaggctagtcctcaaagccgtacatgggagcaacagcaggaggtggtgagccgcaaccggaatgagcaggagagcgctgtccatccaagagagatcttcaaacagaaggaacgtgctatgtctactacgtccatttcatcccctcagcccggaaagctcaggagtccttttctgcagaaacagctcacccagccggagactcactttggccgtgaacccgctgcagccatcagccggcctagggccgatcttcccgctgaggaaccggcaccttcaaccccaccttgtcttgtccaagccgaagaggaggccgtgtatgaggaaccacctgaacaggagactttctacgaacagccacccctggtgcagcagcagggtgccggatccgagcacattgaccaccatatccaggggcaaggactcagtggtcaagggttgtgtgcacgggctttatacgattaccaggccgcagacgacaccgaaatctcattcgatcccgaaaacctcattacagggatcgaggtgatcgatgaaggttggtggcgcggatatggaccagatggtcactttggcatgttcccagctaactacgtcgagcttatcgaatag

SEQ ID NO: 30661 - DNA, 981 bp, synthetic construct
  source 1..981: mol_type = other DNA; note = Synthetic coding sequence
atgccccatcttcctctggcaagctttcgtccacctttctgggggctgagacattcacgaggattgcctcgctttcattccgttagtacacagtctgaaccccatggctcacccattagccgcaggaatagggaagccaagcagaagcggctcagagaaaaacaggcaactctggaagccgagatagcgggagaaagcaaatcacccgctgagtctatcaaggcgtggagaccaaaggaactggtcctttatgaaatccccaccaagccaggcgaaaagaaggatgtatccggccctcttcctcctgcctatagtcctcgatatgtcgaggccgcttggtatccttggtgggtcagagagggattttttaaacctgagtaccaggccaggctcccccaggcgacgggtgagactttttcaatgtgcatacctcctccgaacgtaacaggctccctacacatcgggcacgctttgaccgtggctattcaggatgctttggtccggtggcatagaatgcgtggggaccaagtgttgtgggtgcccggaagtgatcatgccggtatagcaacccaggccgttgtggaaaaacagctttggaaggagagaggagtgaggcggcacgaactgtctcgcgaagcatttctccgcgaggtgtggcagtggaaggaagctaagggaggagagatatgcgagcagcttcgggcactgggtgcatccctggattgggatagggaatgcttcactatggatgtcggctctagcgtcgccgttacggaagccttcgtacggttgtataaggcagggctattgtaccgtaatcaccagcttgtgaactggtcctgtgctctccgctcagcaatatctgatatcgaagtcgagaatcggccactgcccggtcacacacagctgcggctgccaggctgtccaacccccgtgtccttcgggttgctcttctcggtggcttttccggtggatgggtag

SEQ ID NO: 30662 - DNA, 684 bp, synthetic construct
  source 1..684: mol_type = other DNA; note = Synthetic coding sequence
atgctgtgctggggctactggagcctcgggcagccgggaatttccactaacctgcaaggcatcgtcgctgagccccaagtttgtggttttatctccgatcgatcagtaaaggaagtcgcctgtggcggtaaccactcagtgtttctgctggaagacggcgaagtttacacttgcggcctgaacaccaagggacagttagggcatgagagagagggaaacaagcctgagcaaatcggggcattggctgaccagcacattatccatgtggcatgtggagaaagtcacagcctggccctcagcgatagaggacagctcttcagctggggagcgggatctgatgggcagttgggactgatgactacagaggacagcgtcgcagtgcctcgtctcattcaaaagttgaaccagcagactatcctgcaagtgtcctgcggtaactggcactgcctggcactcgcggcagacggccagtttttcacctgggggaaaaattcccacggacagctgggactggggaaggaatttccttcccaagcctcccctcaaagagtaagatctttagagggcatccctcttgcgcaggtggccgctggcggagctcattcctttgccttgtccttaagcggcgcagtctttgggtggggaatgaataatgcaggccagctcggtctctcggacgaatag

SEQ ID NO: 30663 - DNA, 624 bp, synthetic construct
  source 1..624: mol_type = other DNA; note = Synthetic coding sequence
atgagctctcctctggcttccctctcgaaaaccagaaaagtcccccttccgagcgagcccatgaatccaggcaggcgaggcatcagaatttacggggacgtgcccgcaagtcacgactcagagctcatggcatttatgacacgaaaattatgggatctggagcagcaagtgaaagcccagacagacgaaatcctttccaaggaccaaaagatcgcagccctagaagatctcgtgcaaactctgcggcctcatcccgcagaggccaccctccagagacaggaggaattagagaccatgtgcgtgcaactacaacgtcaagtacgggagatggagaggttcctctcggattatggactccagtgggtgggagagccaatggaccaagaagatagcgagtctaagactgttagtgagcacggagaacgagattggatgactgctaaaaagttctggaagcccggagattcccttgccccaccagaggtggactttgatcggctgttggcgtctttgcaagacttgagcgagctggtcgtggagggcgatacccaggtgactcctgtcccgggaggagcgaggctgaggactttggaaccgatacccctgaagttataccgtaactag

SEQ ID NO: 30664 - DNA, 717 bp, synthetic construct
  source 1..717: mol_type = other DNA; note = Synthetic coding sequence
atgacagaggatagccagcgaaacttcagaagcgtctactacgagaaggtgggctttcgaggggtggaggaaaagaagtcactggagattcttttaaaggacgatagattgggaatactgccacctcatcacgagtcgcatgcgaaggtaatgatgtacagaaaggaacagtaccttgatgtcctgcacgcactgaaggtggtgcgattcgtctcagatgctactccgcaggctgaagtctaccttcgtatgtatcagcttgaatcaggtaagcttccacgcagtccgtctttcccgctagaaccggatgacgaggtctttctcgctattgccaaggccatggaagaaatggtggaagattctgtcgactgctattggataaccaggaggttcgtgaatcagctcaatacaaaatacagggattccctgccccagttgccgaaagctttcgagcagtatctgaaccttgaagatggtcgattgcttacccacctgagaatgtgcagcgccgcacccaaactcccttacgacctatggttcaagagatgttttgcaggctgcctgccagaatcatcactgcagcgagtatgggataaagtggtgagcggatcctgcaaaatattggtatttgtcgcagtcgaaatccttttaacattcaaaatcaaggtgatggctctcaactccgctgaaaagattactaagtttctggaaaattag

SEQ ID NO: 30665 - DNA, 369 bp, synthetic construct
  source 1..369: mol_type = other DNA; note = Synthetic coding sequence
gttcgggagcttgaggccgagttggacgctgaacagaagaaacacgcggaagcactaaagggggttcggaaacacgagcgcagggtgaaagagctcgcctatcaggccgaggaggatagaaaaaatttagccaggatgcaggacctggttgacaagctgcaatctaaggtgaagtcgtacaagaggcagttcgaggaggctgagcaacaggccaacacaaacctggcaaagtacaggaaagcccagcacgaactggacgacgcagaagaaagggcagacatggccgagacccaggccaataagctgcgagcacgaacaagggatgccctagggccaaagctgtccctttcaccacagcataaagaatag

SEQ ID NO: 30666 - DNA, 483 bp, synthetic construct
  source 1..483: mol_type = other DNA; note = Synthetic coding sequence
taggaatcgttagtcggtctccaggaaggtaaaagcactgagcagggtaaccatgatcagcttaaggagctgtactcagccggtaaccttacggtgctggccactgatccactactccaccaagatccagtgcagctggacttccatttcaggttgacgtctcagacctctgcgcattggcacggccttttatgtgaccgccgtctatttctcgatattccgtatcaggccctcgatcagggtaacagggagtccttgactgccaccttggagtacgtcgaggagaagaccaatgtagattctgtctttgtgaattttcaaaacgaccgcaacgatagaggggctctgcttcgagccttcagttatatgggtttcgaggtggtgcggcctgatcaccccgctctacctcctctcgacaatgtcatttttatggtctaccccttagaacgagacgtgggacacttacccagcgaaccaccctag

SEQ ID NO: 30667 - DNA, 102 bp, synthetic construct
  source 1..102: mol_type = other DNA; note = Synthetic coding sequence
atgagtgtgacttatgacgacagcgtgggcgtagaggtgtccagcgattcattctgggaggtgggcaattataagcgtactgtaaagcgcatagatgactag

SEQ ID NO: 30668 - DNA, 402 bp, synthetic construct
  source 1..402: mol_type = other DNA; note = Synthetic coding sequence
atgtggtccttaactgcttccgagggcgaatcaaccaccgcacactttttcttgggcgctggcgatgaagggctgggcaccagggggatcggtatgcgccctgaggaatcggatagtgaactgctcgaagatgaggaggacgaggtgccccctgaaccacagatcattgtcggaatatgcgcaatgaccaagaagtccaaatccaagccaatgactcaaattctggagcggctgtgtaggttcgattatctgactgtggtaattctcggtgaagatgtcatactgaatgagcctgtcgaaaactggccttcttgtcactgcttaatctcattccacagtaagggctttcccttagataaggccgtggcttattccaagctgagaaatcctttcctaatctag

SEQ ID NO: 30669 - DNA, 939 bp, synthetic construct
  source 1..939: mol_type = other DNA; note = Synthetic coding sequence
atggcgcagccttatccgcctgcacagtatccccctccccctcaaaacggcattcccgctgagtacgctccccctccaccacatccaacgcaagactacagtgggcagacgccagtgccgactgagcacggaatgaccctgtacacacccgcacagacccacccagaacaaccaggctctgaggcgagcacccagccaatagccggtacacaaaccgtgccccagaccgacgaagccgctcagaccgactcgcagcctctgcacccttccgatcccacggaaaagcagcagcctaagaggctgcatgtcagtaacatcccgttcagatttagagaccccgatctgaggcaaatgtttggccagttcggcaaaattctggatgtcgaaataatcttcaatgaacgcggatcgaagggcttcgggtttgttaccttcgaaaccagttccgacgccgatcgggcacgcgagaagttaaatggcactatcgtggagggccgaaagatagaagttaacaatgcaacagctcgagtaatgacaaacaaaaaaactggcaacccctacaccaacggctggaagctcaatccagttgtcggcgctgtttacggcccagaattctacgcagtgacaggcttcccctatccaacgactgggaccgcagtggcttaccgcggagcccatctcagaggccgtgggcgagccgtgtacaacacgtttagggctgcacctccaccccctcccattccgacttatggggctgtggtctaccaggatggcttctacggggcagagatatacggtggatacgcagcctacaggtacgctcagcccgctgcagctgcagccgcatattcggattcatacggaagggtgtatgccgcagccgatccataccatcacacaattggaccggcagccacatactctattggcactatgtag

SEQ ID NO: 30670 - DNA, 1308 bp, synthetic construct
  source 1..1308: mol_type = other DNA; note = Synthetic coding sequence
tgaagcattcttaacagcaatgaacacctactgaaagaaaaagagttgctgattgacaagcagagaaagcatatcagtcaactggagcagaaggtgcgggaatctgaactgcaagtccatagcgcactgcttgggcgtccagcccctttcggcgatgtgtgtctgcttcgcctgcaggagctgcagcgcgaaaatacttttctccgagctcagttcgcgcaaaaaaccgaagccctgagcagagagaaaatcgacttggaaaaaaaacttagcgcatccgaagtggaagtgcaactgattagagagtcgctcaaggtagcgttacagaagcacagcgaagaagtgaagaaacaggaggaaagggttaaaggtagggacaagcatatcaacaatctcaagaaaaagtgtcagaaggagagcgaacagaacagagagaagcagcagcggatcgagacgctagagcggtacctcgccgatctcccgactctcgaagatcatcagaaacaatcacagcagctgaaagacagtgaactgaagtctacggagctccaggagaaagtgacggaactggaatccttactcgaggaaacgcaggctatctgtcgcgaaaaagaaattcagctcgagagcctccgtcagcgagaggcagagttctccagcgccggacactcactccaagacaagcagtccgtcgaagagacgagcggcgaaggcccagaggtcgaaatggagtcatggcagaagcgttatgactcacttcagaagattgtggagaaacaacagcaaaagatggaccaactgcgctcacaggtacaatctctggagcaggaggtggctcaagaggaggggacttctcaggctctccgcgaggaagctcaacgcagggacagtgcactccaacaactccgcacagctgtaaaggaattatccgtgcagaatcaggatctgatagagaagaatcttactctgcaagagcacctccgccaggcccagcctggatccccgcctagccccgacacagctcagcttgctctcgaactccatcaggagttagccagttgtctgcaggatctgcaggcagtatgtagtatagtgacacagcgtgcacagggtcatgacccgaatctctcactacttcttggcatccactcccagcaccccgaaactcagctcgatctgcagaagccagacgtgatcaagcggaagctggaggaggtccaacagctgcgcagagatatagaggatttacgcactacaatgagcgacagatatgctcaagacatgggcgaaaactgtgtgacccagtag

SEQ ID NO: 30671 - DNA, 474 bp, synthetic construct
  source 1..474: mol_type = other DNA; note = Synthetic coding sequence
atggagctcaggtgtggtgggctgctgtttagttcgcggttcgactccgggaacttggcacatgttgagaaggttgagtcactcagcagcgacggtgagggcgtagggggaggggctagcgcgcttacatcaggaattgcgagcagccccgactacgaattcaatgtgtggactaggcctgattgcgcagagactgagttcgagaacggcaacaggtcgtggttctactttagcgtgagaggaggtatgcctgggaaattgatcaagatcaatattatgaatatgaataaacaaagcaaattgtactcacaggggatggcccctttcgtccggacattgcccacccggcctcgttgggagcgaattcgagacagacctacgttcgaaatgactgagacacagtttgtgctgtctttcgttcacaggttcgtcgagggaagaggtgccaccacatttttcgcattctgctattag

SEQ ID NO: 30672 - DNA, 1620 bp, synthetic construct
  source 1..1620: mol_type = other DNA; note = Synthetic coding sequence
atggcgacctccgcaccccttcgctcgctggaggaggaggtcacttgttcaatatgtcttgactacttgagggatccagtgacgatcgactgtggccacgttttctgtcgaagttgcacaacggacgtgcgcccaatctccggaagcagacccgtatgcccactgtgcaagaaaccatttaaaaaagaaaatatccgcccagtgtggcagttagcctctttagtcgagaatatcgaaagattaaaggtagataaggggcgtcagcccggtgaggtgacgcgggagcagcaagacgcaaaactttgtgagcggcaccgcgagaagctgcactactactgcgaggacgacggtaagcttttatgtgtcatgtgcagggagagtagggaacatagaccccataccgccgttcttatggaaaaagccgctcagccacaccgagagaaaatcctcaaccatctgtctactctgcggagggatcgggataaaattcagggcttccaggccaagggagaagccgatatcctggcggcactgaagaaactgcaagaccagcgtcagtatattgtcgcagagttcgagcagggacaccagtttcttcgggagcgcgaggaacatctcctggagcaactcgccaagctggagcaagagcttacagagggtcgtgaaaagtttaaaagccgtggggtgggcgagctggcgcgtctcgcattagtgatcagcgaactggaaggtaaagcccagcagccggctgccgaactgatgcaggatactagggattttttgaacagatatccgagaaagaagttctgggtgggaaagcccattgcaagagtggttaagaagaagacaggggagttttctgataagttgttaagcctgcagcggggtctgagagaattccaaggcaagcttctgagagaccttgagtacaagaccgtgagcgtgactctggatccacaaagcgcttctgggtacctccaactatctgaggattggaaatgtgtcacttataccagcctgtataagtcagcatatctgcatccacaacagttcgattgtgagccgggtgtactcgggtctaaagggttcacctggggaaaggtttattgggaggtggaggttgaacgcgaaggttggtcagaggacgaggaggagggagatgaggaagaggaaggggaagaggaggaggaggaagaagaggccggttacggtgatggctacgatgattgggagaccgacgaggacgaggagtcactgggtgacgaggaggaggaggaagaggaagaggaagaggaggtcctagaaagctgcatggtaggtgtcgccagagactccgtgaagagaaagggagacctctctttgaggccggaggatggagtgtgggctcttcgtctgtcatcgtctggtatttgggctaacacctccccggaagctgagctttttccagcactgaggcccagacgggtggggatagccctggactatgaggggggaactgtcactttcacgaacgcagagtctcaggaattgatctacacttttaccgccaccttcacccggcgtttggtgcctttcctgtggcttaaatggccgggaacccggctacttttaagaccttag

SEQ ID NO: 30673 - DNA, 6140 bp, synthetic construct
  source 1..6140: mol_type = other DNA; note = Synthetic coding sequence
atggatgaagtcgagcaggatcagcatgaggccaggctgaaggaactctttgactcctttgacaccacaggcactggctccttgggccaggaggaactaaccgatctgtgtcacatgctgtccctggaggaggttgccccagtactgcaacaaacccttctgcaggataaccttctgggcagggtgcacttcgaccagttcaaggaagccctgatcctaatcctgtcccggaccctgagtaacgaggagcactttcaagaaccagactgcagcctcgaggctcaacccaagtatgttagagggggaaaacggtatggacgacgttctctgccagagttccaggagtctgtagaggaatttccggaagtgacagtgattgagccgctggatgaagaggctagacctagccatatcccagccggtgactgcagcgagcattggaaaacccagcgtagcgaggagtacgaagccgaaggtcagctaagattttggaaccctgatgatctgaatgcctcccaatcaggctccagtccccctcaggactggatagaggagaagctgcaggaagtgtgcgaggatctgggcattaccagggatggccacttgaatagaaagaaactcgtcagcatctgcgagcaatatggcctgcagaatgttgatggggaaatgctggaagaggttttccacaatctggacccggatggcacaatgtctgtcgaagatttcttttacggcctgttcaaaaatggtaagagcctcactccctcagcttcaacaccatacaggcaactgaaacggcacctgtcaatgcagtctttcgacgaatcggggaggagaacaacaactagttccgccatgacatccaccatcggttttcgcgtgttttcctgtctggatgacggcatggggcacgcatcggttgaaagaatcctggatacctggcaggaggaggggattgagaattctcaggaaatcctgaaggcactcgatttcagcttagacggaaatatcaaccttacagagcttactttggcacttgaaaacgaattgctggttaccaaaaacagtatccatcaggccgcactggcatccttcaaggccgaaattaggcacctgttagaaagggtggaccaagtagtgagggagaaggagaagctgcgctccgatctggacaaggcagaaaagctcaaaagcctcatggcctcagaagtggacgaccaccatgctgccattgagcgaaggaatgagtacaatctgcgaaagctggatgaagagtacaaggaaaggatcgctgccctgaagaacgaattacggaaggagagagagcagattcttcagcaggccggtaaacagaggttagagctggagcaagaaatcgaaaaggcaaagaccgaagagaactatatccgcgacaggcttgcgctttccttaaaagaaaactcgagactcgaaaatgaactgctggagaacgcagaaaagttggccgagtatgagaacctcactaataaacttcagcggaatttagaaaacgtccttgcggagaaattcggcgacctggatcccagctccgcagagttttttctgcaagaggaacggttgactcaaatgcgcaatgagtatgaacgccaatgtagagtgctgcaggaccaagtggatgaactccagtcagaacttgaagagtaccgtgcacagggcagagtgctccggctgcctctgaaaaactctccatccgaagaagtcgaagccaatagcggaggcatcgaacccgagcatgggctcggttcagaagagtgtaaccctctcaatatgtccattgaggccgagttggtgatcgaacagatgaaggaacaacatcacagggatatttgctgcctcaggttggaactggaagataaggtcaggcactacgaaaagcagctggacgaaacagtggtttcgtgtaagaaagctcaagaaaatatgaaacagcgtcacgagaacgagacacatacactggaaaagcaaatctcagatttaaaaaacgaaatcgccgagctacagggccaggctgcagtcttgaaagaagcccaccatgaggccacctgcaggcatgaagaggagaaaaagcagctacaagtcaaattagaggaggaaaaaactcacctccaggaaaaactgcggctccagcatgagatggaacttaaagcacgcttaactcaggcacaggcatcattcgagagggagcgcgaaggcctgcagagctcggcctggactgaagaaaaagtgagggggctcacccaggagcttgaacaatttcatcaagagcagctgacatctctggtggaaaagcatactttggagaaagaggagctgcgaaaggagctccttgaaaaacatcaacgcgaactccaggagggacgagaaaaaatggagaccgagtgcaacagacgcactagccagattgaagcacaatttcaaagtgactgccagaaggtgactgagagatgcgagtccgctttgcagtcactggaaggccgttaccggcaggagctgaaagatttgcaagagcagcagagggaagaaaagtcccagtgggagttcgaaaaagacgagctgacgcaggaatgtgccgaggcacaggagctgttaaaagagaccctgaagcgggagaaaacgacatccctggtcctgactcaggagagggaaatgttagagaagacatacaaggagcacctaaactctatggtggtggagcggcaacagttgctccaagacttggaagatctgagaaacgttagcgagacccagcaaagcctcctttccgaccagatcctggaactcaaaagctcccacaagagggagttgagagagagagaagaggtgctgtgtcaggctggagcaagtgagcagcttgccagccaaaggctggaacgcctggaaatggaacatgaccaggagcgacaggaaatgatgtcaaaactactggccatggagaatatccataaggcaacctgcgagacggcagacagggaacgcgctgagatgtctacagagatatcacgccttcagtctaaaatcaaagagatgcagcaggcgacttcgcctctcagcatgctgcaaagcgggtgtcaggttatcggagaggaggaggttgaaggggatggcgcactgtctctgcttcagcagggtgagcagcttcttgaggagaacggggatgtcctgttatcacttcagcgcgctcatgaacaggcggttaaggaaaatgtgaaaatggctaccgagattagcaggttgcaacagcgactgcaaaaactggaaccaggactcgtcatgtcttcttgcctcgatgagcccgctactgaatttttcggaaataccgcagagcagaccgaacaattcctgcagcagaatcgcacaaaacaggtggaaggcgtcaccagacggcatgtcctttctgatcttgaggacgatgaggtgagggacctcgggtccactgggacaagttccgtacaaaggcaagaggtgaaaatcgaggagtctgaggcctccgtagaaggcttcagcgaacttgaaaactccgaagaaacacgtacggaaagttgggagctgaagaatcagatctcgcagctccaggagcagttaatgatgctgtgtgccgactgtgatcgcgctagtgagaagaaacaggatctgttgttcgacgtctccgtcctcaagaaaaaactgaaaatgctggagcggattcccgaagcgagcccaaaatacaaactgctatacgaagacgtgagtagggagaacgattgtctgcaggaggagttgcggatgatggaaacgcgctatgacgaggctctcgagaataacaaggaattgacagccgaggtgttcaggttacaggatgaattaaaaaaaatggaggaggtgaccgaaacttttctgagccttgaaaagtcatacgacgaggtcaaaattgagaatgagggcctcaacgttctggtgctcagactccagggcaaaatcgagaagctgcaggaaagtgtggtacagcgatgcgattgctgcttgtgggaggcctctctggagaatcttgaaatcgagcccgacgggaatatattacaactgaaccagaccctggaggagtgtgtgcccagggtgagaagtgtgcatcatgtgattgaggaatgcaaacaggagaatcagtacctcgaggggaacacccagctgctcgagaaagtgaaggcccacgaaatcgcctggctccacggaacgatccagacacaccaggagagacccagagttcagaatcaggttatacttgaagaaaataccacactcctcggatttcaggataagcactttcaacatcaggcgactattgctgaattggagctcgaaaaaactaagctccaagagctcacccggaagctgaaggagagggtcaccatcctcgtgaagcagaaagacgttctgtcccacggcgaaaaggaagaggagcttaaggcaatgatgcatgatctgcagatcacatgttccgagatgcagcaaaaagtggaattgctccgatacgaatcggaaaagcttcaacaggagaacagcatactgcggaacgaaattacaactctcaatgaggaagatagcatctcaaatttaaagctcggcactctaaacggctctcaggaggaaatgtggcagaagacagaaactgtgaaacaggaaaatgctgctgttcaaaagatggtcgagaacctgaaaaaacagatcagtgaactgaaaataaagaaccagcagttggatttagagaacactgagctgagtcagaaaaacagtcagaatcaagaaaagttgcaggagctgaaccagaggctgacggagatgctctgccaaaaagagaaagaaccaggtaactccgccctagaggaaagagagcaggaaaagtttaatctgaaagaagaactggaaagatgcaaggtgcagagttctacactcgtttcctccctggaagcggaactctcggaggtaaaaattcaaactcatatcgtgcagcaagagaatcaccttcttaaagatgaactggagaaaatgaagcaacttcataggtgcccagatttaagtgattttcagcagaagattagctctgtgctcagctataacgagaaactgctgaaagagaaggaagccttgtcagaggagctgaactcttgcgttgataagctggccaagtcgtcactgctggaacaccgaattgctacaatgaagcaggagcagaaaagttgggagcatcagagcgcttcgttgaaaagtcagctggtagcaagccaagagaaagtccagaatcttgaggacacggtgcaaaatgtcaacctgcagatgagtaggatgaagagcgatctgagagtcactcaacaggaaaaagaagcactgaaacaggaagtgatgtccctgcacaagcagctgcagaatgcaggtggcaagagctgggctccagaaatcgcgacccacccgtccggactgcataaccagcagaagagactgtcctgggataagttagatcacctcatgaatgaggaacagcagctactgtggcaggaaaacgaacgtcttcagacaatggttcagaacaccaaagcagagctaacccatagtagagaaaaggtaagacagctggagagtaatctccttcctaagcatcagaagcacctgaacccgtcggggaccatgaatccaactgagcaggagaaactttccctgaaaagagaatgtgaccaattccagaaggaacagtctccagctaatagaaaagttagccaaatgaattccctcgaacaagaacttgaaaccattcatctggagaatgagggcctaaagaaaaaacaggtgaaactggacgaacagctaatggaaatgcagcatttaaggtctacggcaactcccagtcccagtccccatgcctgggatttacaactcttgcagcaacaggcatgcccaatggttccaagagagcaatttctgcagttgcaaaggcagctgctccaagccgaacggataaatcagcatttgcaagaggaactggaaaaccggaccagcgaaacaaacacaccgcaggccctgcttcccgagcagcgggctgtgcatgcagactcctatcgccgaatagggcacctgta

SEQ ID NO: 30674 - DNA, 1203 bp, synthetic construct
  source 1..1203: mol_type = other DNA; note = Synthetic coding sequence
atggcaggcgagaatcatcagtggcaagggtccatcctttataatatgctgatgagcgctaagcaaaccagagctgctccagaggctccagaaacaagactggtcgaccaatgctgggggtgctcttgtggggacgagccgggtgttggtcgggaaggcttacttggtggacggaatgtggccctcctgtataggtgctgtttttgcgggaaggatcacccacgccaggggtccatcctttactctatgttaactagcgcaaaacaaacctatgccgcacctaaggcgccagaggccactttaggcccttgctgggggtgcagttgcggatcagaccctggggtgggtcgggcaggcttacctggtggccgtcccgtggcgcttctgtatcgatgttgcttctgtggcgaggatcaccccagacaaggatccattctgtacagccttcttacttcttcaaagcaaacccatgtagccccagctgcacctgaggcccgaccaggaggggcatggtgggaccgcagttactttgcccagaggcctggaggcaaggaggccctgcctgggggaagagctactgccctgctttaccgatgttgcttctgcggggaagaccacccgcagcaaggttctaccctatattgcgtaccgactagcaccaatcaggctcaggctgctcccgaggagagacctagagccccttggtgggataccagcagcggagcccttcgcccagtggctctgaaatctcctcaggtagtgtgtgaagctgctagcgcaggactcctgaaaaccctaaggtttgtcaagtacttgccctgcttccaagtcctgccactcgatcagcagctagtgctagtgaggaactgttgggctagtttgttgatgctggagcttgctcaggataggctgcagttcgaaacagtggaagtgagcgagccatcgatgttacagaagatcctgactaccagaaggagagagacgggcggaaatgagccgctcccggtccccaccttacaacatcacctggctccgcctgcggaggctagaaaggtccctagcgcctctcaggttcaagcaattaagtgcttcctgagtaagtgttggtcactgaatatctctactaaagagtatgcttaccttaagggcaccgtactcttcaacccgggtaaaggtaaagagaacgactgtaatcatcattag

SEQ ID NO: 30675 - DNA, 627 bp, synthetic construct
  source 1..627: mol_type = other DNA; note = Synthetic coding sequence
atgaagcaactggaagaccatgaggcctttgagacctcctccttaattggtcacagcgctagggtgtacgcgctctactacaaggacgggctgttgtgtaccggatctgatgacctcagtgccaagctgtgggatgtgtcaaccgggcagtgcgtgtacggcatccagacacatacatgcgccgcagtcaagttcgacgagcagaaactggtcacgggctccttcgataatacggtggcctgctgggaatggagctccggagcgaggacccagcattttcggggtcatactggcgctgtcttttctgttgactacaacgatgaattagacattctggtgagtggcagtgcagatttcacggtaaaagtgtgggccctgtccgccggtacttgcctcaacacgctgaccggccacaccgagtgggttaccaaagtagtcctccagaagtgtaaggtcaagtctctgctccactcacctggggattacatcctgttatctgccgacaagtacgaaatcaaaatatggcctattgggagggagattaactgtaaatgcctgaaaaccctgagcgtgtccgaagacaggtccatatgtttacagccaagattgcattttgatggaaagtag

SEQ ID NO: 30676 - DNA, 639 bp, synthetic construct
  source 1..639: mol_type = other DNA; note = Synthetic coding sequence
atgttcggggtgacgaagttcggggataatatcgaggatgagtggttcattgtatatgtgattaagcagattaccaaggaatttccagaactagttgccaggattgaggacaatgacggggagtttctcctgatagaagctgctgactttcttcccaagtggttagaccccgaaaacagcaccaaccgggtttttttttgccacggagaattatgcataataccagccccacgaaaatcaggagctgagtcctggctgcccaccacccctcctaccatccctcaggctctgaacatcatcacggctcatagcgaaaagatattggcctctgaatccatccgggctgccgtgaatcgacgaattagaggatatcccgagaagattcaagcctcattacatagagcccactgttttttgccggctggcattgtagcagtgctgaagcagcgccctcgcttagtcgccgcagctgtgcaagccttttacctccgcgatcctatcgatctgagagcctgcagagttttcaagaccttcttgcccgagacgaggataatgactagcgtcacgttcacaaaatgcctgtatgcccaactggtccagcagcgcttcgtccctgaccgtcgctcagggtacagatag

SEQ ID NO: 30677 - DNA, 474 bp, synthetic construct
  source 1..474: mol_type = other DNA; note = Synthetic coding sequence
atggctacgtcagcaccactgcggtctttagaggaggaggttacatgctccatatgccttgattacttaagggacccggttacgatcgactgcgggcatgtcttctgcagaagctgtactaccgatgttcggccaatcagtgggtctcggccagtgtgtcccctttgtaagaagccatttaaaaaagaaaacatccgtcctgtctggcagctggcttcccttgtagagaacattgagcggttgaaagtagataaaggcaggcagcccggtgaggtgacccgcgagcagcaggacgccaaactttgcgagaggcacagggagaagctgcactattattgcgaggacgacgggaagttactctgcgtcatgtgccgtgaaagccgagagcatcgaccacacacagcggtcctgatggagaaggccgcacagccacacagagaaaagatcctcaatcatctcagtactctccgctag

SEQ ID NO: 30678 - DNA, 4773 bp, synthetic construct
  source 1..4773: mol_type = other DNA; note = Synthetic coding sequence
atgtccgcgacgagctggtttctcgtgtcttcatccggagcacgccatcgtttgccacgcgagctcattttcgtcgggagagaggaatgtgagctgatgctgcaatcacggtccgttgacaaacagcacgcagtcataaactatgaccaggaccgcgatgaacactgggtgaaggacttaggcagcttgaatggcaccttcgtgaatgacatgcgaatacctgaccagaagtacgtcacattgaaactaaacgacgtgatccggtttggatacgatagcaatatgtacgtcttggagcgagtccaacacagggtgcctgaagaggcactcaagcatgagaagtacacttctcagctccaggttagcgttaagggcctggcccctaagagatctgaggctctgcccgaacacactccctactgcgaagcttcaaaccctagacctgagaaaggcgacaggaggccaggcaccgaggctgcctcatatagaaccccactgtacggccagcccagctggtggggggaagacgatgggtcaacactccccgatgcccagagacagggagaaccctacccagccgagcggcctaaggggcctgtgcaacaggatggcgagctgcacgggtttcgcgctccggcagaaccgcagggctgtagtttccgccgagagccctcttatttcgagatccccacgaaagagaccccacagcccagccagccaccagaagtgcccgctcatgaaatgccgaccaaggatgcagaagccggagggggaggcgctgctccagtggtccaatcacacgcctccttcacaattgagtttgacgactgttctccaggcaaaatgaaaattaaggaccatatcacaaaattctccctgaggcaaaggcgtcctccaggcaaagaggccacgccaggggagatggtcagcgctgaaaccaaggtcgcagattggctggtccaaaacgatccatccctgttacatcgtgttggcccaggcgacgaccggcactctaccaaatccgacctaccagtgcatacccgtactttgaagggtcacaaacacgaagacgggacgcagtctgatagcgaagacccacttgccaaagcagcatccgcagctggggtcccccttgaagccagcggagagcaggtgcggctgcagcgtcagataaagcgcgacccccaggagctgctgcacaaccagcaggcatttgtgatcgaattctttgatgaagacacccccaggaagaaacgttctcagagcttcacccactccccttccggtgatccgaaagccgacaaaagaaggggccctactcctgcagatcgcgatcgcccaagcgtgcctgcacctgttcaggcagggggtagatcttcgggccctcagcgcgctggctctctgaaacgcgagaagacagaggagcggttggggtccccatccccggctagtaggactcctgctagaccattcggcagtgtgggccgtcgctcacgcctcgcacaggacttcatggcccagtgcctccgggagtccagtccggctgctaggccctcacccgagaaggtccctcccgtgctgccagcacccctaaccccgcatgggacctcaccagtgggccctcccaccccaccacccgcaccaaccgacccacaactaactaaagctagaaaacaggaagaggatgacagtctgtctgacgccggaacctatactattgaaaccgaagctcaggatactgaagtggaggaagctagaaaaatgattgaccaggtcttcggcgtgcttgagagtcctgagctttcacgggcaagttcggcaacctttcgtccagtgatccgtggagatcgagatgagagcgatgatggcggtgtcgcccaacggatggctcttctgcaggagtttgcttctaggcccctgggagccgctccacaagccgagcatcagggtctgcctgtgcccggatcccccggaggtcagaagtgggtgagccggtgggcttccttggccgactcatactctgatcccggtctaactgaggacggtctgggccgtaggggtggagagcctgaaggcagcttacccgttcggatgagacgacggctaccacaactgccgtcagagagagccgatagccccgctggtcctgagagctcaaggcgaagcggccctggtccgccagagctagactcagagcagccaagcagacttttcggacaggaggaattggatccggatagcctgtcagatgcctctggctcagatgggggaagaggacctgaacccggagtggagcctcaggattctcgccgtaggtctccacaggaggggccaacgtggtcccgagggagaaggtcgccaagggcaccaggagagcctaccccagcatccttctttattggcgaccagaatggtgacgcggtactgtcacggaaacccttggccgcacccggagatggggaaggactgggacaaacagcacagcccagccctcctgcacgggatggagtgtatgtgagtgctaacgggaggatggtgattcaactgcggcctggaagatcacccgaacccgatgggccagctcctgcattcttacgccaggaaagttttaccaaggagcccgcaagcggaccacccgctccagggaagcctccacatatttcctcacaccccctacttcaggatttggcagctacaagagcggctcgcatggacttccactcccaggacacacacctgatcctcaaagagacggaaactgcactggccgcacttgaggctcgattgctgtctaattcagtagacgccgagtgcgaagggggatctacccctcgaccgcctgaagatgcactgagcggagacagtgacgtggatacagcatccaccgtctcactgcgctcaggaaagagcggccctagtcccaccacgccacagcccctgcgcgctcagaaagagatgtcaccaagcccccctgccgcacaggacccaggcggaactgcgctggtttccgccagagaacagtcctcggagagacagcatcaccctctcggccctaccgacatgggcagaggcgaacccgtgaggaggagcgctatcagacgagggcaccggccacggggtagtcttgattggccctcagaggagaggggaccagtgttggcccacctcccatcaagtgacgttatggcaagcaatcacgaaacacctgaagctaccggtgccggtaggttgggctcacgcagaaaacccgcagctcctccgcctagtcctgccgcacgggaagagcaatcgcggtcaagcgctagcagtcagaaggggcctcaggcattgactaggtctaacagtctgtctaccccgagaccgacccgggcatctcgccttaggcgtgcccgtctcggggatgcgtccgataccgaggccgcagacggagagagggggtctctggggaacccagagcccgtgggaaggcccgctgccgagcaagccaagaaactgtcgcgcttagacatcctcgctatgccaagaaagcgcgcaggaagttttaccggaactagtgacccagaggcggcacccgctaggaccagcttttccggaagatccgtcgagctgtgctgtgcttcccgtaaacctacaatggcagaagcaagggctgtgagccgcaaagcggctaacaccgccaccacaacaggacctagacaaccgttctctagagcacgctctggatcagcgcgatacactagtaatacccggagaagacagcagggaagcgactacacctctacatcggaggaggagtatggatcccgccacggatcccccaagcatacgaggtcccatacttccactgccactcaaacgcccagagcgggttccagcagtcgtgccagatccagagcgccaggccctcgagatacagatgatgacgaggaggagccggacccttatggttttatcgtccagaccgcagaaatcgccgagatagctcgcctctcacaaaccctcgtaaaagacgtcgccattctggcacaggagatccacgacgttgccggagacggagatacactaggctcaagcgagcccgcacactctgcatccctctccaacatgccttcgactcctgcctcgacaatctctgcgagagaggaattagtgcagagaatccccgaggcttccctcaattttcaaaaagtccctcctggttctctcaattcccgcgatttcgaccagaatatgaatgattcatgcgaggacgccttggccaacaaaaccagacctcggaacagagaggaggttattttcgacaatctcatgctgaaccctgttagtcaactaagtcaggccatcagagaaaacacggagcatctggccgaaaaaatgaaaatcttgtttcagaatacgggaagagcctgggaggatctcgaagcacgtatcaatgctgaaaacgaagtccccatattaaaaacatccaataaagaaattagttccattctcaaagagttgcgtcgggtacagaaacagcttgaagtgatcaacgccattgtggacccctcaggatcactcgatctgcttacagggaatcggtcactggcatctagcgcccagccagggttggggaaaggcagggtggccgcacaatcccctccctcccctgcgtcagctgaggccctcctccctgccttgcccctccgcaattttccccagcgcgcatcctgtggtccacctagccttccagatccaacgtttctgccagacgccgaaaggttccttatatag

SEQ ID NO: 30679 - DNA, 1452 bp, synthetic construct
  source 1..1452: mol_type = other DNA; note = Synthetic coding sequence
atgtctggcggaggcccttccggcggaggccctggaggttcaggcagggcaaggacctccagtttcgcagagcccggtgggggaggcggtggaggcggaggcggtccaggcggatccgcctctggcccaggcggaacaggaggtgggaaggccagcgttggggctatggggggaggcgtcggagcaagctcttccgggggaggtcctgggggtagtggtgggggtggaagcgggggaccaggcgctgggacgtccttccctcccccaggcgtcaagttaggcagagactcaggcaaagtgaccaccgttgttgcaaccttgggtcagggacctgaacgatcacaggaggtggcatacacagatataaaggtgatcgggaacggatctttcggggtggtgtaccaggccagactggctgaaaccagagagctagtggcaatcaagaaggttctccaggacaaaaggtttaagaatcgcgaactgcagattatgcggaagctggatcactgtaatatcgtcagactacgctacttcttttactcctccggtgaaaagaaagacgagctctatctgaaccttgtgctggaatacgtgcccgagaccgtttaccgggtggctcgtcatttcaccaaggctaagctcactatacccatcctgtacgttaaggtgtacatgtaccagctttttagaagtctagcctacattcacagccagggcgtctgccacagagacatcaagccgcagaacctcctggtggacccagacaccgctgtgctaaaactgtgtgacttcggcagcgccaaacaactcgttcgcggtgagcccaatgtgtcctacatatgtagtcgttactaccgggctcctgaactgatcttcggagccaccgactacacctcaagcatcgacgtgtggagtgcgggatgcgtgctggcggagcttctactgggtcagcccatcttcccaggggattctggcgtggatcagctggtcgagataatcaaggtgctaggaacccctactagggagcagattcgcgagatgaacccaaactacacagagtttaagtttccgcagataaaagctcatccttggactaaggtgtttaagagcaggacccccccagaagctatcgccttgtgttcctcgctcctggagtacactcctagtagccggctgagtcccttggaggcttgtgcgcactctttttttgacgagctacgatgtctgggaacacaattgccgaataatcgccctctgcccccactgttcaatttctcagctggcgagctctctattcagccaagtctgaatgctattctcattccccctcatcttagatcaccagctggtactacaacactcacaccatcctcccaggctctaacagaaacccccaccagcagcgattggcagagtactgacgcaacaccaacactcaccaacagctcatag

SEQ ID NO: 30680 - DNA, 1389 bp, synthetic construct
  source 1..1389: mol_type = other DNA; note = Synthetic coding sequence
atgggcggagctgaagcagagccttgggggcgagcacctggcccagcaatcggtgggcgtagagcaggggacagttgtcccggttggagaagaaggagcagatctcggggacgcggacagcggttgtcgcacggtccacgcaggaggccacagctgctaacagcagcccctccactgcaggcacgcggagcctttcgctctttcccccattcatggggagaggattttctagcttctctgatgtttaagatccagctcgaacccttgaaactccgagcctggacactcaacgggtttgtgaaatttagaaataaagaaaccagcgccggaccagttgccgtaatggggaaagactactacaaaattcttggcatacccagtggggctaatgaggatgaaatcaagaaagcctataggaagatggccctgaagtatcaccccgacaagaacaaggaaccaaacgctgaggaaaaatttaaggaaatagccgaagcctacgatgtcctgtctgatcctaaaaaacgaggtctgtatgaccagtatggagaagaaggcctcaagaccggcggaggaacgtcaggcggttcaagtggttctttccattacacatttcacggtgatccacatgccaccttcgctagtttctttgggggatcgaatccctttgatattttctttgcctcctccagatctaccagacccttctctggattcgatccggacgacatggatgtcgacgaagatgaggatcctttcggcgcttttggacgatttgggtttaatggcctttcccgcggaccaagaagggcacctgagcctttgtacccccgtagaaaagtgcaggatcctccagtcgttcacgaactccgggtgagcctggaagagatctatcacggctccactaaacggatgaaaatcactcgccgaaggttgaatcccgacggaaggaccgttcgtactgaagataagattcttcacattgtcataaaacgcggatggaaggaaggaacgaagatcactttccctaaggagggtgacgctacccctgataatattcctgcggacatcgtttttgtgttaaaggacaaaccccacgctcactttagaagagatgggacaaacgtgctctatagtgccttgattagcttgaaagaggctctctgtggttgtacagtcaacattcccactatcgacggacgggttatccccttgccatgtaatgatgttatcaaaccgggtacagtcaaaaggctgaggggtgaggggctgccctttcctaaagtacccacgcagcgtggagacctgatcgtggagttcaaagtgaggtttccagatcgcctcactcctcagacgaggcaaatccttaaacagcaccttccatgtagttag

SEQ ID NO: 30681 - DNA, 279 bp, synthetic construct
  source 1..279: mol_type = other DNA; note = Synthetic coding sequence
gtgtacggtgcaaaagatatcgaacttagtccagaggcccaggctaaaatcgatagatacacacagcaggggtttggcaacctgcccatctgtatggctaagacacatttatcgttatcccaccagcctgacaagaagggggttccccgagatttcatcctgccaatttcagatgtcagagctagtattggcgctgggttcatttatcccctcgtaggaaccagaagctcgcccctggccttagtgggggagtcacaacctaaacaggtgcacccatag

SEQ ID NO: 30682 - DNA, 468 bp, synthetic construct
  source 1..468: mol_type = other DNA; note = Synthetic coding sequence
atgagcgttacttacgatgactcagtgggagtggaggtctctagcgatagtttctgggaggtaggaaattacaagcgcactgtcaaaagaattgatgacggacataggctgtgctccgatctgatgaactgcctgcatgaaagagccagaatcgaaaaagcgtacgcccaacagctaaccgagtgggctaggcggtggcgccagttggtggaaaagggcccacagtacggaacagtggaaaaagcctggatggcatttatgagcgaggcggagagagtctcagagctgcacctggaggtgaaagctagtctgatgaatgatgacttcgaaaagatcaagaattggcaaaaagaagcctttcacaagcaaatgatgggcggatttaaagagaccaaagaagccgaggatggatttcgcaaggctcagaaaccttgggccaagaagctgaaggaggtgcacttgtcctag

SEQ ID NO: 30683 - DNA, 483 bp, synthetic construct
  source 1..483: mol_type = other DNA; note = Synthetic coding sequence
atggaggccgagcgtccacaagaggaagaggatggggagcaaggtcctccccaggacgaagaaggctggcctccccctaacagcaccactcgcccttggaggtctgcacctccgtcacccccaccgcctggcacccgtcacactgcactcggaccaaggagcgcttccctgctatcattgcagaccgaactccttctcgacctggttgccgaggctcaaagcagacggcttgaagagcaaagggcgactttttacactccacagaatccatcttcattggcacccgcacccctccgacccctcgaggatcgcgagcagctgtattcaaccattctgagccaccaatgccagagaatggaggcccagcgcagtgaacctcccctgcccccaggcggacaggaactactggaactactgctgagagtacagggagggggtcgtatggaggagcagcggtctaggcctcctacccatacttgctag

SEQ ID NO: 30684 - DNA, 660 bp, synthetic construct
  source 1..660: mol_type = other DNA; note = Synthetic coding sequence
atggaaccttcagctcagcagctgcagctcgcggcttctctgcccgctaatctgagcaatttttgccaaggctctgaaatgccaacaacctcccgccctgctctggacgtcaagggcggaacttcaccagctaaagaggacgccaatcaggagatgagtagcgtggcctatagcaacctggccgtgaaggataggaaggcagttgcgatcttgcactaccccggagtggccagcaacgggaccaaggcgtcaggcgcacccacgtctagctccgggtctcccattggaagccccactactactccccctactaaaccgccttccttcaacttacacccagcccctcacttactcgccagcatgcaccttcagaagcttaatagccaatatcaaggcatggctgcggcaacccctgggcagcccggagaagctgggcctctgcagaactgggactttggtgctcaggccggaggtgcagaatccctctccccttctgcaggagcccaatcccctgccatcatcgactccgaccctgtggacgaagaagtgctgatgagcttagtggttgaattgggactcgacagagcaaacgagctcccagagctctggttaggtcagaacgaattcgacttcactgccgatttcccttcatcttgctag

SEQ ID NO: 30685 - DNA, 318 bp, synthetic construct
  source 1..318: mol_type = other DNA; note = Synthetic coding sequence
atgaatatgatctggagaaattccatctcatgcctgcgtctcgggaaagtgccacaccggtatcagtccggataccatcccgtggcgccacttggatccagaatcctgacagatcccgcaaaagttttcgaacataatatgtgggaccacatgcagtggtccaaggaagaggaagccgctgctcgcaagaaggtaaaggagaattcagccgtgagggtcctgctggaagagcaggtcaaatacgaacgggaggcgtctaagtattgggatactttctataagatacacaagaacaaattctttaaagatagaaactag

SEQ ID NO: 30686 - DNA, 366 bp, synthetic construct
  source 1..366: mol_type = other DNA; note = Synthetic coding sequence
tgagagggcgaaagtcccacggcaagtcctcattccagtgccaccgatgacctgcaccactctgaccgttaccaaacattcctacgggtacgagcaaacagacagacccgcctgaatgccagaataggcaaaatgaaacggaggaaacaggatgaaggacaagtatgtccattatgcaatcggccactggctggaagcgagcaagaaatgagccgccacgtggagcactgtctcagcaagcgagagggaagctgtatggccgaagatgacgctgtcgacatcgaacacgaaaacaacaatagatttgaagaatacgaatggtgtggacagaaaaggattagagctactacactgcttgaaggctag

SEQ ID NO: 30687 - DNA, 1701 bp, synthetic construct
  source 1..1701: mol_type = other DNA; note = Synthetic coding sequence
atggatctgcaccgggcagcattcaagatggaaaacagctcatacttgccgaatccactcgcttccccggctctgatggttctggcgtctacagccgaagctagccgggatgctagtatcccatgccagcagccacggcctttcggagtgccagtctccgttgataaggacgtccatattcctttcaccaatggttcttacacttttgctagcatgtatcatagacagggcggtgtgcccggaaccttcgctaatcgcgatttccctccatcccttctccaccttcacccccagttcgccccaccgaatctggactgcacacctatcagcatgctaaaccactccggagtgggcgcattcagaccttttgcctccactgaggatagggagtcctaccagtccgctttcactcccgcaaaacggttgaaaaactgccacgacaccgaatccccacacctgcggttctcagatgccgatgggaaggaatacgacttcgggactcaactgccctcctcctccccagggtccctcaaggtggacgatacaggtaaaaagatattcgccgtttctggtctcatctccgatcgtgaggcatcatcttctcccgaagaccgcaatgacagatgtaagaaaaaggctgcagctctttttgattcacaggcaccaatatgcccgatctgtcaggtgttgttacgtccctcagagcttcaggagcacatggagcaggagcttgagcaactcgcccagcttccaagctccaagaactcactcctcaaagatgctatggcccctggtacacccaagtccctgctgctgtctgcatccataaagcgcgaaggagaaagcccgacagcgtcgcctcactcctctgcaacagatgaccttcatcactcggacaggtaccaaacatttttgagggtgagggctaatcggcagactagactgaacgctcgtatcggcaaaatgaaacgacgtaagcaggacgagggccagagggaggggtcgtgtatggccgaggatgatgcagtggacattgaacacgagaacaacaacaggttcgaagaatatgaatggtgtggccagaaacgcatcagagctacaactctgctggagggcggttttagaggatcagggtttatcatgtgtagcggaaaggagaatcccgacagtgatgccgacctggacgttgatggcgatgacaccctggagtatggaaagcctcagtataccgaggccgatgttattccttgtaccggcgaggaaccgggagaggctaaggagagagaagctctgcggggagcagtgctcaatgggggtccaccaagcacgcggataactcccgaattttcaaagtgggctagcgatgagatgccgtccacatctaatggagaaagcagcaaacaagaagcaatgcagaaaacttgcaagaacagcgacattgagaagatcaccgaggactcggccgtgaccactttcgaagctctgaaagctagggttagagagctggagcgtcaactgagccggggagacaggtacaaatgtctcatttgtatggacagctattctatgcccctgacctctatccaatgctggcatgttcactgtgaagagtgttggctgaggacactgggcgcaaaaaaactctgcccgcaatgtaacacaatcaccgcccctggcgaccttaggcgaatctacctctag

SEQ ID NO: 30688 - DNA, 4719 bp, synthetic construct
  source 1..4719: mol_type = other DNA; note = Synthetic coding sequence
atgttgcttcacctgtgtagtgtcaaaaacttgtaccaaaacaggttcctgggtctagctgcaatggcatcaccttccaggaacagtcagtcacgtaggcgctgcaaagaacccctaaggtattcctataatccagaccagttccacaatatggacctccggggaggcccacatgatggcgtcactatccccaggtccacgagcgacacagaccttgtcacgagcgatagtaggagcactcttatggtgtcatcctcttactatagcattggccactctcaggacctggttatccattgggatattaaggaggaagtagacgcaggggattggataggaatgtatctgatcgatgaggtgctctctgaaaacttcttagactacaagaatagaggcgtaaacgggtctcaccgcggacagatcatatggaagatagatgcttcttcttactttgttgaaccagagaccaaaatttgtttcaaatactaccacggagtatcgggcgctctacgggcaactactccctccgtcacagtgaagaattcagctgctccaatctttaagtcgataggtgctgacgaaaccgttcagggtcagggcagccgacgcctgattagttttagtttgagtgacttccaggctatggggctgaaaaaagggatgttcttcaaccccgacccatatctcaagatctccatacagcctgggaagcactcaatattccctgcgctgccacaccacggtcaggagcgccgttccaaaataataggaaatacagttaatccgatttggcaggctgaacaattctcttttgtctctttaccaactgacgtgctcgagatcgaggttaaagacaagttcgccaagtctcgtccaatcattaagcgctttctggggaagctgtctatgcccgtccaacgcctgttagagcgccatgctatcggcgatagagtggtgtcctacaccctcggcaggagactgccaacagaccatgtgagcggccagctgcaatttagattcgaaattacaagttctatacatccggacgatgaagagatatccctgtccactgaacctgaaagcgctcagatccaggactcgcccatgaacaacctcatggagagcggaagtggcgagcctagaagcgaggcccctgaaagcagcgaatcctggaaacccgaacagttgggggaaggtagcgtgccagatggacccggtaatcagtccatcgagctttccagacccgctgaagaagccgctgtgattacggaggctggcgatcaagggatggtgtccgtcggaccggagggagcaggcgagctcctggctcaggtccaaaaagatattcaacccgctccttctgcggaggaactggctgaacagttggacctcggggaggaggcctccgccttactgttagaggatggggaggctccagcctcaactaaagaggaacctctcgaggaagaggctactacccagtccagagccggtcgggaggaagaagaaaaggaacaggaggaagagggggacgtgagcacattggagcagggcgaggggcgattacagttgcgggctagtgtcaagcgcaagagcagaccctgttcccttcccgtatctgagctggagacggtcatcgcgtccgcttgcggtgacccagaaacaccaaggacacattatattagaattcacaccctgctgcacagtatgccttcagcccaaggcggatcagctgccgaggaggaagacggagcagaggaagaatcaactcttaaagactcaagtgagaaggacgggctttcggaggtggacacggtagccgctgatcctagtgccctggaagaggaccgcgaagaaccagagggagctacaccagggactgcgcatcccggacacagtggaggccactttccaagcctggcaaatggagccgctcaggacggagatacacacccttcaaccgggagtgaatccgattcttctcccaggcaaggcggtgaccattcttgtgaggggtgtgacgcgtcgtgttgttccccctcctgctactcctcatcctgctacagcacgagctgctactcctccagctgttatagtgcgtcttgctattcaccttcttgttacaacggaaatagatttgcgtcccacacccgcttctcctccgtggattccgctaagatttccgagtctactgtgttcagtagtcaggacgatgaggaggaggagaactcagccttcgagtctgttcctgattccatgcagtccccagagttggaccctgagtctacaaacggcgctgggccatggcaggacgaactcgctgcaccatcagggcacgtggagagatcaccagaggggttggagtctcccgttgccggacccagcaaccgcagggaagattgggaggctcggattgactctcatggaagagttttctacgtcgatcacgtgaatcgaacaacaacctggcaaagacctacggctgcggctacaccagacggtatgagaaggtcggggtctatccaacagatggaacagctcaatcgcagatatcagaacattcagcgcacaatagcgaccgagaggtcagaagaggattcggggtcacaatcttgtgagcaggccccagcgggtgggggtggcggtggaggctctgactcagaggcagaatcttcgcagtcgtctcttgacctgcgcagggagggatcgctctccccggtcaactcacagaagatcaccctcctgctgcagagtcccgctgtgaagttcattacgaatcctgagttcttcaccgtgcttcacgccaattactccgcctacagggtttttacatccagcacatgcctcaaacatatgatcttgaaggttcgaagagacgcccgaaatttcgagagatatcaacacaaccgggaccttgtgaatttcatcaacatgttcgccgacacgagattagagctgcccaggggttgggagatcaagaccgatcagcagggaaaatctttctttgtggaccacaacagtcgtgccaccacatttatcgatcctcgaatcccattacagaatggcagactcccaaaccacctcacccacaggcagcatctgcaacggctccgctcctattccgccggagaggcgtctgaagtgtcaagaaacagaggagctagtcttctcgcccgacccggtcatagcctggtggcagccattagaagccagcaccagcacgagtcacttcctctggcctataacgacaagatagtggcctttttacgacagcccaacatatttgagatgctgcaggagagacaaccaagcctggccaggaaccacacactcagggagaaaatacattatatccgcacagaagggaaccatggtctggaaaagctcagctgtgacgctgacctggtaatcctgctcagtttgttcgaggaggaaataatgtcgtacgtccccctacaggccgctttccatcctggctacagtttctccccaagatgcagcccctgttcttctcctcaaaattcgccgggactccaacgcgctagtgctagggcgccaagcccttataggcgcgactttgaggccaaacttagaaatttttacaggaaactggaagctaagggttttggccaggggcctggcaagattaaactgattatccgcagagaccacttattggagggcacctttaaccaggttatggcctactctagaaaagaacttcagcgaaataaactttatgtgaccttcgtcggagaggaagggctcgattattcagggccatcgagggaattttttttccttctctcacaggaactattcaacccatattacggtctgtttgaatactctgctaatgacacctacaccgtgcaaatctcccctatgtctgcttttgtcgagaaccacttagaatggtttagattcagcggaaggatcttgggcctggcattgatccatcagtacttattagacgcatttttcacacgacccttttacaaagcccttctgcgattgccctgcgatctgagcgatcttgaatatttggacgaagagtttcatcagagcctccaatggatgaaagataacaatattacagatatcctggatcttacatttaccgtcaatgaggaggtatttggacaagtgacggaacgtgaattaaagagcgggggagcaaatacacaggtgaccgaaaaaaacaagaaagagtatatcgagcgaatggtgaagtggcgggtggagcggggtgtggtgcaacagacggaagctcttgttaggggtttctacgaagtcgtcgattcccggttggtgagcgtctttgacgctcgggagttggaacttgttattgcgggtaccgctgagatcgatctgaatgactggcgtaacaataccgaatacagaggaggttatcatgatggacatctggtcatcagatggttctgggctgcagtggaacgttttaacaatgagcagagattaaggctgctgcagtttgtgactggtaccagctctgttccctacgagggattcgccgctctaagggggtcaaatggacttcggaggttctgcattgagaaatggggtaagattactagcttgcctagggctcatacatgctttaaccggctcgatctaccgccttatccgtcttactcaatgctatacgagaagctgttgaccgccgtggaggagacctccacgttcggcttggagtag

SEQ ID NO: 30689 - DNA, 1629 bp, synthetic construct
  source 1..1629: mol_type = other DNA; note = Synthetic coding sequence
atgagtgggctcgtgctgggccagagagacgaacccgctggacaccgcctgagccaggaggagattctcgggtccacccggctcgtgtcccagggactcgaagccctaagaagcgaacaccaggctgtgctgcagagcctgagtcagacgatcgaatgtttacagcaaggaggccacgaggaaggcctggttcatgaaaaggccaggcagctgcgtcgatcgatggaaaacattgaacttggattgtcagaagctcaggaggagaaagagggggatgccactaaggacagcctggacgatttgttccctaacgaggaggaagaggaccccagcaacggactatcccgtggccagggcgcaaccgctgcccagcagggtgggtacgagattccagcgcgactgcggaccctgcacaacctggtgatccagtacgcagctcaaggcaggtatgaagtagctgtgcctctgtgtaaacaggctctggaggacttggaacgtacaagcggtaggggtcatcctgatgtggctactatgctgaatattctcgcactggtctatagggaccagaataagtacaaggaggctgcccatctgctgaacgatgctttgtcgattcgagagtcgacactggggcctgatcatccagccgtcgccgctacacttaataacctggcggtcctttatgggaaacgagggaagtataaagaagccgaacctctatgccaaagggcgctggagattagggaaaaagtgcttggaacgaaccaccctgatgtggcgaagcagctgaataatttggcacttctatgccaaaaccaggggaaatatgaggcagtggagagatattaccagagggcactcgccatatacgagggccagttggggcctgataacccaaatgtggcacggacgaagaacaacctggccagttgttatttaaaacagggtaagtatgccgaagcagagaccctgtacaaagagattctgacacgggctcacgttcaggagttcggctctgtagacgatgaccacaaaccaatttggatgcatgcggaagaaagagaggaaatgagcaagagcagacaccatgaaggcggtactccatatgcggagtatgggggatggtataaggcttgcaaggtttcatcccctaccgtgaatacaacactaaggaatctgggggctctgtatagaaggcagggcaagttagaagcagccgagacgttggaagagtgtgccctgaggagccgacgacagggcacagacccgatttcccaaaccaaagtggctgaattgcttggagagagcgacggaagaagaactagccaggaaggacccggagactccgttaagtttgaaggcggtgaagacgcttctgtcgcagtcgagtggtccggagacggcagcggtactctgcagcggtcagggtccctgggaaaaattagggatgttttgcggcgaagtagcgagctcttagtgaggaaactgcaggggaccgagcccagacccagctcgagcaatatgaagcgagcggcttccctcaactacctaaatcaaccctcggctgcacccttgcaggtgtcaagaggtctttcagccagtactatggatttatcaagttcctcttag

SEQ ID NO: 30690 - DNA, 1548 bp, synthetic construct
  source 1..1548: mol_type = other DNA; note = Synthetic coding sequence
atgtgccaggtcggtgaggattatggggagccagccccagaagagccaccccctgccccaagacccagtagagagcagaagtgtgtcaaatgtaaggaggctcagcccgtggtggtcatcagggccggagacgcattctgcagagactgcttcaaggctttttacgtccacaagtttagggccatgctgggtaagaacagactgatattcccaggggaaaaggtgcttctggcatggtccgggggtccaagttccagcagtatggtttggcaagtgctggagggactgtcccaggattccgcaaagcggttacgattcgtagcaggggtcatcttcgttgatgagggagctgcctgcgggcagtcgcttgaggaaagatcaaagaccctggcggaggttaagcccatcttgcaggcaactgggtttccttggcacgtggtggccctcgaggaagtgttcagtctacccccatcggtgctttggtgttctgcccaggaactcgtcggctctgagggtgcctataaagccgcagtagactctttccttcagcagcagcatgtgctaggcgcaggcggtggtcccggaccaacacagggtgaggaacagcccccacagccacccctggacccacagaatctcgcaagaccccctgctccagctcagacagaagcgttatcccagctgttttgttctgtgagaaccttgaccgctaaggaggaactgctgcaaactctccgaacccatttaatacttcacatggctcgagcccacgggtactctaaggtgatgactggcgacagttgtacccggttggccatcaagcttatgacaaatcttgctctgggcagaggggcatttctggcttgggatacggggttcagcgacgaacggcacggggacgttgtcgtggttcggcctatgagagatcatactctgaaggaagtggccttctacaaccgtctattttcggttccctccgtcttcacccccgctgtggacacaaaggcacccgagaaagcatccattcatcggctcatggaggctttcatccttcgtctacagactcaattcccaagcacagtcagcaccgtgtatcggacctcagagaagcttgtcaagggcccacgagatggtcccgcagcaggtgattcaggtcctcgctgcctgctgtgcatgtgtgccttagacgtggacgcagccgactccgcgactgcttttggcgcacagacatcctcccgcctaagccagatgcaaagcccaatccccctgactgagactaggactcctcccggaccttgctgcagtcctggcgtgggttgggcccagagatgtggccagggagcctgtcgaagagaagaccctcaggcttgcatagaggagcagttatgctattcttgcagagtgaacatgaaagatctaccctcattagacccactgcctccctatatcctcgccgaggcccagctgagaacgcagcgggcatggggcctgcaggagattcgcgattgcctgatcgaggattccgacgatgaagccggacagtcctag

SEQ ID NO: 30691 - DNA, 1263 bp, synthetic construct
  source 1..1263: mol_type = other DNA; note = Synthetic coding sequence
atgttcaaacggactgtcctatcttgcccccctcccgcagcaccccctctccaggcgagaggcgcatttcggtccttcccccattcctggggcgaggacttcctcgccagtctcatgttcaaaatacaattggagcctttgaaacttagagcctggaccttgaacggcttcgtgaagtttcggaataaagagactagcgccggacccgtcgctgtgatgggaaaggactactacaaaatattggggatcccatcaggagcgaatgaggacgaaatcaaaaaggcatatcggaagatggctctaaagtaccacccagataagaataaggagccaaacgctgaggaaaagtttaaagaaatcgctgaagcatatgatgtcctgtccgatccgaaaaagcgaggcttgtatgatcagtatggcgaggagggcttaaaaactgggggtggcacctccggcggttcttcaggatcttttcattacacctttcacggcgaccctcatgctacctttgctagcttctttggcggtagcaacccttttgatatttttttcgcatctagtaggtctacaaggccgttcagtggttttgaccccgacgacatggatgtggatgaagatgaggacccatttggcgctttcgggagatttggcttcaatggcctaagtagaggccctcgtagagcccctgaacccctgtaccctagacggaaggtgcaggaccctcctgttgttcatgagctgagagtgagtcttgaggagatctatcatggttctaccaagcggatgaaaatcacacgaaggcgtctcaatcccgacggacgcacagtgcgaacagaagataagatcttgcatatcgtgattaaaagaggttggaaggaggggaccaagatcacctttccaaaggagggagacgctactccagataatatcccagccgacatagtgtttgtactgaaggataagccacatgcacacttcaggagagacgggaccaatgtactttacagcgccttgatctcgctgaaagaagccttatgtggctgcaccgtgaatatccccaccattgatggtagagtgatcccccttccttgcaatgacgtgatcaagcctggaaccgtgaagagattgcggggagagggactgccgtttcccaaggtgcccacccagcgaggagatctcatcgtcgaatttaaggtaagatttccggaccggttaacgcctcagacccgacagattctgaaacagcacctcccctgctcctag

SEQ ID NO: 30692 - DNA, 2979 bp, synthetic construct
  source 1..2979: mol_type = other DNA; note = Synthetic coding sequence
atgtatggctctgccaggtctgtcgggaaggtcgagccgtccagccagtctcccggacggtcccctagactgccaagaagtcctcgcctaggacatcgcagaactaactccactggaggatctagtgggtctagtgtggggggaggttcgggtaaaactctgagtatggagaatatccaatccttgaatgccgcttatgccacatccggtcctatgtatttgagcgaccacgagaatgtgggctcggaaacacctaaatccaccatgaccctgggacgctctgggggaaggctgccgtatggtgtcagaatgacagcgatgggcagtagccccaacatcgcaagctctggggtagcctccgatacaattgcatttggagagcaccacttaccccctgtctcgatggctagcactgtgcctcattcacttagacaggccagagacaacacgattatggacctacagactcaattgaaggaggtgctccgggagaacgacctgctgaggaaagatgtcgaggtgaaggaatctaagctgagtagtagtatgaattctatcaagacattctggtcacccgaactgaaaaaggaaagggctctgcggaaggatgaagcttccaaaattactatatggaaggagcagtatcgcgtggtccaggaggagaatcagcatatgcagatgaccattcaggccctgcaggacgaactccggattcagcgcgacctgaatcagttattccaacaggattctagcagccgcactggggaaccatgtgtggcagaattgactgaggaaaacttccagcgactacacgccgagcacgagagacaggctaaagagctgttccttctccgcaagactctcgaggaaatggaattgaggatcgaaacccagaaacaaacactgaacgccagagatgaatctatcaaaaaactccttgagatgctgcaatcaaaaggtctttctgccaaagccacagaggaggatcatgagcgtacacgccgtctggccgaagcggagatgcacgtgcaccacctcgagagcttgctggagcagaaggagaaggaaaatagcatgctccgcgaggaaatgcaccgtcgctttgaaaatgctcctgatagcgctaagactaaagccttacagacagtgattgagatgaaggattctaaaatcagttctatggagaggggcttacgcgacttggaagaggagatccagatgctgaagagtaacggggctttgtctaccgaagagcgggaggaagagatgaaacagatggaagtgtaccgatcacactccaaatttatgaaaaataagatcggccaggttaaacaggaactgagccgcaaggacaccgaattgctggcactgcagacaaaacttgagactctcacaaatcaattctccgactctaaacagcacattgaggttctgaaggagtccttgactgcaaaggaacagagagcggctatactccagactgaggtggacgcactacgcttgaggctggaggagaaggaaacgatgctaaataagaagacaaaacagattcaagacatggctgaggaaaagggaacacaggcaggagaaatccatgatcttaaagacatgctcgatgtgaaagagcggaaagtgaatgtgctgcaaaagaagatagaaaacctccaggagcagctccgcgacaaggagaagcagatgtcctcactgaaggagcgggtgaagagcttgcaggcggacaccacaaacacagacactgccctgaccaccctggaagaagctctggctgagaaggaaaggaccattgaaagactgaaagaacagcgagatcgggacgaacgggagaagcaggaagagatcgacaactacaagaaagacttaaaagacctcaaggagaaagtatctcttttgcagggtgatcttagcgagaaggaagcatcattgctcgatcttaaagagcacgcttccagtctggcttcttcagggctcaagaaggattcgcgtctcaaaaccttggagatcgctctggagcagaaaaaggaagaatgcctaaagatggaatctcagctaaagaaggcacacgaagccgcactggaggcacgggctagccctgaaatgtcagacagaatacagcaccttgagagggagataacccgctacaaagacgaaagctccaaagcgcaggctgaagtggatcgactcctcgagatacttaaggaggtggaaaatgaaaagaatgataaagacaagaaaatcgccgagcttgagagcctcttcagccgacaggttaaggaccaaaacaaaaaagtggcaaatctgaagcacaaggaacaggttgagaaaaagaagtccgctcaaatgctggaggaagccaggaggcgtgaagacaacttaaatgattcgagtcagcaactgcaggatagcctgagaaagaaagacgaccggatcgaggaactggaggaagctctacgagaatctgtacagattaccgccgaacgcgagatggtcctagcacaggaagagtctgccagaacaaatgccgagaagcaagtggaggagctgctgatggctatggagaaagtgaaacaggaactggagtccatgaaagcaaaactaagtagtacgcagcagagcctcgccgagaaggaaacccacttgacaaatctgagagcggaacgcagaaagcacctggaggaggttctcgaaatgaagcaggaggctctgctggcagcgatttctgagaaggatgctaacatcgctttgcttgaactgtcgagcagcaagaagaagacccaggaggaggttgcagccctgaagagggaaaaggatcggctcgttcaacagctcaaacagcagacccagaatcggatgaaactaatggcagacaactacgaagatgatcactttaagtcttcacactctaatcagaccaatcacaagccatctccagatcaagacgaagaggagggcatatgggcttag

SEQ ID NO: 30693 - DNA, 180 bp, synthetic construct
  source 1..180: mol_type = other DNA; note = Synthetic coding sequence
atggagccttcagcccagcaactacagctcgctgcgagtctgccggctaacttatccaacttttgtcagggaagcgagatgcctactacgtcgaggccagcattggacgtgaaaggagggacttctcctgcaaaggaggacgctaatcaggagatgagctcggttgcatattcgaactag

SEQ ID NO: 30694 - DNA, 6977 bp, synthetic construct
  source 1..6977: mol_type = other DNA; note = Synthetic coding sequence
atgaaaaagggaagtcaacaaaagatcttcagtaaggctaaaattcctagcagcagtcacagcccaattccttccagtatgtccaacatgcgctcaagatcactgtccccactcatcggcagtgagacccttccctttcacagtggtgggcagtggtgtgaacaggtagagatcgctgatgagaacaacatgttactcgattatcaggatcacaagggagctgattcgcacgccggtgtccggtacattactgaggcacttataaagaagctgacgaagcaagacaatctagccctcatcaaatctctgaatctaagtctgtccaaggacggtggtaagaagtttaagtacatagaaaatctcgaaaaatgcgtaaagctcgaggttctcaacctgagttataatctgattggtaaaatagaaaagcttgacaagttgctaaagctgcgcgagctcaacttgtcctataataagatttcgaagatcgaagggattgaaaacatgtgcaacctgcagaagttgaatctggcaggaaatgaaatcgagcacatacctgtgtggcttggaaagaaactgaagagcctcagggtcctcaatcttaaaggcaacaaaattagtagccttcaggacataagcaagctcaaaccccttcaggatttgatcagtctaatcctggtggagaatcccgttgtcacactgccccattacctccaatttactattttccatctgagatcacttgagtccctggagggccaacccgtgaccactcaggacagacaggaggcatttgagaggttcagccttgaggaggtagaacggctggaacgagacctggaaaagaaaatgatcgagacagaggaactgaagtccaaacagacacggtttttggaggagattaagaaccaggacaagctcaacaaaagtttgaaggaagaagctatgctccaaaagcagagctgcgaagaactcaaaagcgatctgaacacaaagaatgaactgttgaagcagaagacaatcgagctcacgagggcctgccagaagcagtatgaacttgagcaggaactggcattctacaaaatcgacgccaaattcgaacctctgaattattatccatctgagtatgcagagattgacaaagctcctgatgaatccccctacattggcaaatcccgatacaagcgtaatatgttcgccaccgagagttacataatcgattcagcccaggccgtccaaatcaagaaaatggagccagacgagcagttgcgcaacgaccatatgaatttaaggggtcacactccgctggacacccagttggaggacaaggagaagaaaatcagtgctgcccaaaccagactgtcagaactgcacgatgagatcgaaaaggccgagcagcagattttgcgggctaccgaagagttcaaacagttggaagaagccattcagctcaagaaaatttccgaagccggaaaagacctcctctataagcaactatcaggcagactgcagctggtgaacaaactgcggcaggaggccctggacctggagttgcagatggagaagcaaaaacaggaaattgctggaaaacaaaaagagatcaaggaccttcagattgccatcgatagcctagactccaaagaccccaagcacagtcacatgaaggctcaaaaaagtggtaaagaacagcagttggatattatgaataagcagtaccagcagcttgagtcccgactggacgaaatcctcagccggatcgccaaagaaacagaagagattaaggatctggaagagcaacttacagaggggcagatagccgctaacgaggctctaaaaaaggacctggaaggcgtaatttcaggccttcaggagtacctgggaaccatcaaagggcaggcaacacaggcgcaaaatgagtgccgaaaattgagagatgagaaggaaactttactacagcgactcacagaagtggagcaagaaagagaccagctcgagatcgtggccatggatgctgaaaacatgaggaaggagctggcggaactagaatccgccctacaggagcagcacgaagtaaacgcatccttacagcagacacagggagatttgagcgcatacgaggcagagctggaagcgagactaaatttgcgtgatgccgaggcgaaccaactcaaggaggagctggagaaggtaacccgtctgacccagctggagcagtctgcgctgcaggccgaacttgaaaaagagcggcaagccctgaaaaacgccttagggaaagcccagttctcagaagagaaagaacaggaaaacagcgagttgcacgccaagctgaagcacctccaggatgataacaatcttctgaagcagcagctgaaggattttcaaaatcacctgaaccacgtagtggatggccttgtgaggcctgaggaggtcgccgctcgtgtggatgaactgcggagaaaactcaaactgggtaccggtgagatgaacatacactccccctccgacgttctggggaaatctctcgccgacctgcagaagcagttctctgaaattctcgcccgaagcaagtgggagagggacgaggcccaggtacgtgaaaggaaactgcaggaggagatggctctgcagcaggagaaattagccacaggacaggaagaatttagacaggcatgcgagagagcgctcgaggccaggatgaattttgacaaacgccagcacgaagcccgaatccaacagatggaaaacgagatccattacctgcaagagaatctgaagagcatggaggaaatccaaggactgaccgatctgcagctgcaggaggcagacgaggagaaggaaagaattctggcacaacttcgtgaacttgagaagaagaagaagctggaagatgccaaaagccaggagcaagtgtttggtttggataaggagctgaagaagttaaaaaaggcagtcgctactagcgacaagctggcaacagccgagctcaccatagccaaggaccaactgaaatccctgcacggtacagtcatgaagattaatcaggagagagccgaggaacttcaggaagcggagagattctccaggaaggcagctcaggctgccagggatctgaccagagcagaagcggagattgagctgctacaaaacctgctgcggcagaaaggtgagcagttccggctcgagatggagaagaccggggtcgggaccggggcaaatagccaagttctggagattgagaagttaaacgaaaccatggaaaggcagaggaccgagatcgccaggttgcagaacgttttggatttaaccgggagtgataataaggggggattcgagaatgtcttagaggaaatcgcagagctcaggcgtgaagtgtcttatcagaacgactacatatcaagcatggccgatccttttaaaaggaggggttactggtacttcatgcctccgcctccctcttctaaagtaagttcccacagttcacaggctaccaaggatagtggcgttgggctcaaatattctgcgagcacccctgttaggaagcctcgacccggtcaacaggacgggaaagagggaagccagcctcctcccgcttccggatattgggtctactcccccatcaggagtggactccacaagctatttccgtcgcgagatgcagattccggaggcgatagtcaagaggagtctgaattagacgatcaggaggagcccccttttgtgcccccacctggatatatgatgtataccgttctacctgacgggagccccgtcccccaagggatggccctgtacgcacctcccccaccgctgcccaataacagtagaccactcacaccaggtacagtcgtttacggtccaccacccgctggagccccaatggtttacgggccaccaccaccaaacttttccatcccctttatccctatgggcgtgttacactgcaacgtgccagagcatcacaatctggagaacgaggtgtctaggttagaggatatcatgcagcacctcaagtcgaagaagagggaagaacgctggatgagagccagtaagagacagagcgagaaagagatggaggagctccatcataacatcgatgatctgctgcaggaaaagaagtctttggaatgtgaagtggaggaactacatcggacagtgcagaaaaggcaacagcagaaagactttatcgacggcaacgtggaaagtcttatgacagaactggagatagagaagtcacttaagcatcacgaagatatagtggatgaaatcgagtgcatcgagaaaactctgttaaagaggcgttccgagctcagagaagccgatcgactgcttgcggaagccgagtcggaattgagttgcacgaaagaaaagaccaagaatgctgtcgagaagttcacggacgccaagcggtcccttctgcagactgagagcgacgccgaagagctggaaaggagggcacaggaaaccgcggtgaatctggttaaagctgatcagcagctgagatctctgcaggccgacgctaaggatttggagcagcacaagatcaagcaggaggaaattctgaaggaaatcaacaagatagtggctgccaaggactccgactttcagtgtttatccaagaagaaagaaaaattgaccgaggagctgcagaagctgcagaaggacatcgagatggccgaacggaatgaggatcatcacctgcaggtgctcaaggaaagcgaggttctcctgcaggctaaacgagctgaacttgagaaactcaagtcacaagtcactagtcaacagcaggaaatggccgtgctggaccggcagctgggacacaagaaggaagagctgcacctgctacagggatctatggtacaggcaaaagctgacttacaggaggccctccgtctgggcgagaccgaagtgacagagaaatgtaatcacatccgagaggttaagtccctacttgaggaactctccttccaaaaaggagagctgaatgtccagatttcagagaggaagacccagctcacccttattaaacaagaaatagagaaggaagaggagaatctgcaagtggtgctgaggcagatgagtaagcacaagactgagttaaaaaatatccttgacatgctgcaattagagaatcatgaattgcaaggcctgaaattacaacacgaccagcgcgtgtccgaacttgagaaaactcaggtagccgtgctcgaggagaagctggagttggagaacctccagcaaatctcacagcagcagaagggagagatcgagtggcagaaacagctgttggaaagagataagcgggaaatcgaaaggatgacagcggagtctcgagccctgcagtcgtgtgtagagtgcctctccaaggagaaggaagatctccaggagaagtgtgacatctgggagaaaaagctggcacagaccaagcgcgtcttagcagcagccgaggaaaatagtaagatggaacaaagcaatctggaaaaactagaactgaacgttagaaaattacaacaagaattagaccagctgaacagagataaactctccttgcataacgatattagcgctatgcagcagcagctgcaggagaaacgtgaggccgtgaactcactgcaggaagaactcgcgaacgtgcaggaccatctgaacctcgccaaacaggacctgctgcacactactaagcatcaggatgtgctgttatccgagcagacgaggctccagaaggacattagtgagtgggctaaccggttcgaggattgtcagaaggaagaggaaacaaagcagcagcagttacaggtccttcagaatgaaatcgaggaaaacaagttaaaactggttcagcaggagatgatgttccagaggctacagaaggaacgcgaatctgaggagagcaaactggaaacaagcaaggttaccctcaaagagcagcagcatcagcttgaaaaggaactgaccgaccaaaaaagcaagttggaccaggtgttgtcaaaggtcctggctgcggaggaacgagtgcgcacactccaggaggaggaaaggtggtgcgagtccttagagaagactttatcccagaccaaacggcagctgagcgagagagaacagcagctagtggaaaagtcaggcgagctgttagcgttgcagaaggaggcggatagcatgcgcgcagacttttctctgctacgtaatcagtttttgacagagagaaagaaagcagagaaacaggtcgcctctcttaaggaagccctcaaaattcagcgctcacagcttgaaaaaaatctgttggaacagaagcaggagaacagctgtatccagaaagaaatggccactatcgaactagtggcccaggacaatcacgagagagccaggcgactcatgaaggagctcaaccagatgcaatacgagtacacagagctgaaaaagcagatggctaatcagaaggacctggagcgcaggcagatggagatctcagatgccatgaggacactgaagtccgaggtcaaggatgaaatccgcacaagtctcaaaaacttgaaccaattcctccctgagctgcctgccgatctggaagccattttggaacggaatgaaaatctagagggggagttagagtcgctgaaggagaatctgcctttcactatgaacgaaggtccattcgaggaaaagctgaacttcagtcaggttcacattatggacgagcattggaggggagaggccctgagggaaaaacttcggcatagggaagacaggctgaaggctcaacttaggcattgcatgagcaagcaggcagaggtactgatcaagggtaagagacagactgagggcacactacattctcttcgtcgccaggtggatgcactgggggaacttgtcacgtctacaagtgccgactccgcaagctctccttccctgtcccagctggagtcctcgcttacagaggactctcagttaggccaaaaccagaagcagaataacagccttaggta

SEQ ID NO: 30695 - DNA, 657 bp, synthetic construct
  source 1..657: mol_type = other DNA; note = Synthetic coding sequence
atggatgaactggtgacacttgaggaagcagatgggggatccgacatactattagtggtccccaaggcaacagtgttacagaatcagttagatgagagccaacaggaacgcaatgatttgatgcagcttaagcttcaactggaaggacaggtcactgagttaagatccagagttcaggagttggagagggctctggctaccgcccgacaggagcatactgagctcatggagcagtacaaaggaatttctcgttcacacggcgaaattactgaggagagggacatattgagccggcagcagggcgatcacgttgccagaatactcgagctcgaagacgacattcagactatctccgaaaaggttctaaccaaagaagtggagcttgatcgtctgcgggacacggtcaaggctctcactcgcgagcaggaaaagttgttgggccagctaaaagaggtgcaagcagataaggagcagtccgaggctgagctccaggtggcacaacaggagaaccatcatttaaatctcgatctgaaagaggccaaatcctggcaggaggagcagagtgcccaggcccagcgcctgaaagacaaagtcgctcagatgaaggacactttaggtcaggcccagcagcgcgttcggccatcctggtcaccctag

SEQ ID NO: 30696 - DNA, 693 bp, synthetic construct
  source 1..693: mol_type = other DNA; note = Synthetic coding sequence
atgaagaaaccccgacctgctgccgcagctccatctccgcgaccaccagcatgcagcagaggcgcacaccccggaacagcatctgaactgagggtccccgctctgcgcagggggggatgtggcgaccgtaggcttagagaagaagccgcaccggaacaggcagcagccggtccacgtcgctcgaccgtgggagcactgcttgcaagcgagcttggctggaagttctatgacgctgacgactaccaccctgaagaaaatcgcagaaagatgggcaagggcatccccctcaatgatcaagaccgcattccatggttgtgcaacctgcatgacattctactccgagatgtagcttctgggcaaagagtggtgttggcctgctccgccctcaaaaaaacctaccgcgacatcttaacccagggaaaggatggggtggcgctcaagtgcgaggagagcggaaaggaagctaagcaagctgaaatgcagctcctcgtggtgcatctgtccggctccttcgaggttatcagcggcaggctacttaaaagagagggccacttcatgccgccagaattgctccagagccagttcgagaccctcgagccgcctgctgcacctgagaatttcatacagatttccgtggataagaacgtgagcgagatcatcgccacaatcatggaaacgctgaaaatgaaatag

SEQ ID NO: 30697 - DNA, 957 bp, synthetic construct
  source 1..957: mol_type = other DNA; note = Synthetic coding sequence
atgtgtcgcacggccctcggtgttacaaccctccaggacttgggagtgtgttggaggaaagaacacgatcccgctgagatgcttcgagtgggtcgagccgagctgggaggctggaagccctcatgggaggccattgtgaaagaagtggccgctgcgactgggcataccgttgttctcgtcgatcaaaccgaggatatcttggcaaaatcgaagaagggtatagaggagtcccttaggaaagtggccaagaagaagtttgcggagaacttaaaagctggcgacgaatttgtcgagaagactctcagcaccattgccacaagcaccgacgccgcatcagtggtccacagtaccgacctggtggtcgaggcaatagtcgagaatctgaaagtgaagaacgagctgtttaaacgtctggataaattcgcagcagagcacaccatattcgcatcgaatacatcctccctgcagattactagtatcgcaaacgccactactcggcaggatagattcgcgggtctacatttttttaatccagttcctgttatgaagctggtcgaggtgattaaaaccccaatgacttctcaaaaaaccttcgaaagcctcgtggactttagcaaggccctgggaaagcaccctgtatcttgcaaggacactcccggttttattgtgaatagactgcttgttccgtatctcatggaggcgatacgattgtatgagcgcggtgacgccagcaaggaagacatcgacacggctatgaagctcggagcgggatatcctatgggcccttttgaactgttagactatgtcggacttgatacgaccaagtttattgttgacggatggcacgagatggacgccgaaaacccactgcaccagccctcccctagcctcaacaaattagtggcagagaataagtttggcaagaagacgggagaaggattctataaatacaaatag

SEQ ID NO: 30698 - DNA, 666 bp, synthetic construct
  source 1..666: mol_type = other DNA; note = Synthetic coding sequence
atggctattgtacagacactgcctgtacccctcgagccggctccggaagccgcaaccgccccacaggcacccgtaatggggtctgtcagcagcctcatcagcgggcgtccgtgccctggcggacccgcaccaccaagacaccacggacccccaggaccaacctttttcagacagcaagatggacttttgcggggtgggtacgaggcccaggagccgctttgtccagcggttccacctcggaaggcagttcctgttactagcttcacatatattaacgaggatttccgaactgagtctcctccaagtccaagttccgatgtcgaggacgcaagagagcagagagcacacaacgctcacttgcgtggcccaccccctaagctcatccctgtcagtggcaaattggagaaaaatatggagaagatacttatcaggccaaccgcattcaagcccgtgttgcccaagcccagaggcgctccttcgttgccaagtttcatgggccctcgagcaaccgggctgagcgggtctcaaggatcactcacccagctatttggaggtcctgctagttctagcagctcttctagctcctcttcagcggctgataagcccttggccttctcaggttgggcgtcaggttgtcctagtggtaccctgtccgatagcggctag

SEQ ID NO: 30699 - DNA, 585 bp, synthetic construct
  source 1..585: mol_type = other DNA; note = Synthetic coding sequence
atgagagagctggccgcagttgtgagccgtgacatttacctgcataatccgaacattaaatggaacgatattattggtctagacgctgctaagcagcttgtaaaagaagccgtggtgtaccccatcagatatcctcagcttttcactggtatcctgtccccttggaaaggcctgctgctgtacggcccacctggcaccggaaagactctgttagctaaggcggttgctaccgagtgcaaaaccactttctttaacatctctgcctcaaccatagtcagcaaatggaggggggactccgagaagctagttagagtgctctttgagttagccagataccatgccccatcgaccatctttttggatgagcttgaaagtgtcatgagtcagcgaggtaccgcctccggtggtgaacacgaaggaagcctacgcatgaagactgagcttcttgtgcagatggacggcctggctaggtcagaagacctggtattcgtgcttgctgcttctaacctcccctgtctgaaagctatagctctgcagcctggtgacagagccaggcttcgattgaagaagaagaagtgtacctag

SEQ ID NO: 30700 - DNA, 555 bp, synthetic construct
  source 1..555: mol_type = other DNA; note = Synthetic coding sequence
atgacctttcaatttaatttcacaattgaagatcacctggagaacgagttgactcctattcgcgacggcgcactgaccctggatagcagtaaagaactgtccgtttcggaaagtcaaaagggagaggagcgggatcgcaaatgcagcgcagagcaattcgacctaccccaggatcatctgtgggagcataaaagcatggaaaatgctgctcctagtcaagacacggacagtcctctgtcagccgcttcgagcagtagaaatctggaaccccacggcaaacaaccctcactgcgcgctgccaaggaacatgccatgccgaaagaccttaaaaagatgttggaaaacaaggttatagagacgcttcctgggttccagcatgtgaaacttagcgtagtgaagaccatactcctgaaggaaaatttcccaggggagaatattgtatctaagtccttctcatcacactctgacctgatcaccggggtttacgaggggggtctgaagatttgggaatgtacattcgatttgctcgcctactttaccaaagcaaaagtgtag

SEQ ID NO: 30701 - DNA, 354 bp, synthetic construct
  source 1..354: mol_type = other DNA; note = Synthetic coding sequence
atggtactgattctgggtagacgcttgaatcgcgaggaccttggtgtccgggattctcctgctacaaaaagaaaagtatttgagatggacccaaagagcctgacaggccacgagttctttgacttcagctcagggtctagccacgccgaaaacatcctgcagattttcaatgagtttcgggacagccggctattcacagacgtgatcatctgtgtggaagggaaggaattcccctgccatagagcagttctgtcggcttgcagcagttatttcagggctatgttctgtaacgaccatagagagagccgggaaatgctggtcgagatcaacggcattttggcagaggccatgtag

SEQ ID NO: 30702 - DNA, 498 bp, synthetic construct
  source 1..498: mol_type = other DNA; note = Synthetic coding sequence
atgatcttgaacgtattggaatatggaagccagcaggtcgccgacctgaccctcaatttggacgactatatcgacgccgagcacctgggagacttccatcggacgtataaaaactccgaggagttgcggagtcgcatcgttagcggcataattacccccatccatgaacagtgggagaaggcaaacgtctcaagccctcaccgcgaattcccccctgcgacagcacgggaggtggacccccttagaattccgccacaccatcctcatacgtcccgccagcccccttggcctcgcagggggggtatgattgtcgacccgctacggagtgggtttccacgcgcattaatagatccaagttcgggtttaccaaaccgtcttccacctggggcagtcccgcctggagctcggttcgaccccttcggaccaatcggaacctcgccccctggtccaaatccagatcacctaccccctcccggttacgatgacatgtacttatag

SEQ ID NO: 30703 - DNA, 369 bp, synthetic construct
  source 1..369: mol_type = other DNA; note = Synthetic coding sequence
gccctgaccttctcattgcgcgctggcgctgcttctgcccaagacggccgatgtccctgcggagccaggaggcctgattctcgacttctgcagttgcatataaccatgccattttcttctcccatggaagccgagctagtccgcaggatcctgagccgggatgctgcgccactgcctcgaccaggtgctgtgttaaaagacttcaccgtgtccggaaacctgctatttattaggctgacagcagccgatcaccgacagctccagctcagtatttcgagctgtctgcagcagcttagcctcctgatgtggattacgcaatgttttcttccggtttttcttgcacaggctcccagtggacagaggcgctag

SEQ ID NO: 30704 - DNA, 2415 bp, synthetic construct
  source 1..2415: mol_type = other DNA; note = Synthetic coding sequence
atgaaaagtattggcgtgaagactgtaaaggtgtgtgggtccaagagcagcgtacgcattgaaggtcaaccctgcagtctaggccagtctaggagaaaagtcaaattgatgggagagcggagttatacactgtctattggtaacggcgactacttctgggcaaataaggaaatgctgtgggactacgtccagacgctgagcgaccagggggcagaaaagcatgaaggcactggtcagtcctcgggaattacggatcaggaaaaagagctgtccacaaatgccttccaggcctttacgagcgggaactacgatgcatgcctgcagcacctggcctgcttacaggatattaataaggatgattataaaataatccttaacactgcagtggcagagttttttaagagcaaccaaaccacaacagataacttgcggcagaccttgaaccagttaaaaaaccaagtgcattcagctgtggaagagatggacggactggacgacgtggagaactcaatgctctattataatcaggctgtaattctgtatcatttacgtcagtacactgaggcaatatctgttggagaaaagttgtaccagttcattgagccattcgaggaaaagtttgcccaggccgtgtgctttctactggtggatctgtatatcctgacgtaccaggccgaaaaagcccttcatcttttggccgtcctcgaaaaaatgatctcacaggggaacaataataaaaacgggaagaatgaaacaggcaacaacaacaataaggatggctctaaccacaaagcagagagtggtgccctaatcgaggccgctaagtccaagatccaccagtacaaggtccgggcatacatacagatgaagagtctgaaggcctgcaaaagggaaattaagagcgttatgaataccgccggaaattccgccccttcgctgtttctcaaatctaactttgaatacttacggggaaattatcgcaaagccgtgaagcttttgaattcttccaacatcgctgagcaccccggtttcatgaagacaggcgaatgtttgcgctgtatgttttggaacaatttgggctgcattcacttcgcaatgagtaagcacaatctggggatcttctacttcaagaaagcactacaggagaacgacaacgtctgcgctcagctctccgccggaagtacagatccgggaaagaaattcagcgggaggccaatgtgtactctgctgactaataagcgttacgagttgctgtataattgcggcattcaattgctccatatcgggaggccgctggcagctttcgagtgtctgattgaagcggtacaggtctatcacgcaaacccgcgactttggctcaggcttgctgaatgctgtatcgccgcaaacaaaggaacctcagaacaggaaacgaagggactgccctccaagaaagggattgtacagagtatcgtaggtcagggctatcatcgtaagattgttctggcttctcagagcatacagaacacagtgtacaatgacggccaaagttccgccatacctgtggcttcaatggagtttgccgcaatctgcttaagaaacgccctgctgttgttacccgaagagcagcaggaccccaagcaagaaaacggtgcgaagaacagtaaccaactgggcggtaacacagagtcatcagagagcagcgagacctgttcctcgaagagccatgacggggacaagtttattcctgctcctccctcttcacctctcagaaagcaggaactagagaacctcaagtgcagtatattggcctgctcagcctacgtcgcactcgccttaggtgacaatctcatggccctgaaccacgccgataaacttctccagcagcccaaactgagcggcagcctcaaattcctggggcacctatatgctgctgaggcactgatctctctggacagaatttctgacgctattacgcacctcaacccagagaacgtgaccgacgtttctctgggaatctcaagtaatgaacaggaccaagggtctgataaaggcgagaatgaggcaatggaaagtagcggtaagagggcaccccagtgctaccccagcagcgtaaacagcgctcggaccgtgatgctgttcaatctgggcagcgcctattgcctacgtagcgagtacgataaggcgaggaagtgcctgcatcaggctgctagtatgattcatcccaaggaggtgcctcccgaagcaattctcttggccgtgtacctggagctccagaatggcaacacgcagttagctcttcaaatcattaaaagaaatcaactgttgcctgccgtgaagacccacagtgaagtaagaaagaaacctgtgtttcagccagttcatccaatccagcctattcagatgcccgctttcactaccgtgcagaggaagtag

SEQ ID NO: 30705 - DNA, 1899 bp, synthetic construct
  source 1..1899: mol_type = other DNA; note = Synthetic coding sequence
atggataccatgatgctgaatgtacggaacctcttcgagcagctggtccgcagggttgagatactgagcgaggggaacgaagtacagttcattcaactggcaaaggacttcgaggactttcgcaagaaatggcagcgaactgatcacgaattggggaagtacaaggatctactgatgaaggcggaaacagaacggtccgctctcgacgtgaaactgaagcacgcaaggaaccaggtggacgtggagatcaaaaggagacagagggcagaggccgattgtgagaagctggagagacagatccagcttatcagagaaatgctgatgtgcgatacatctggctctattcagctgtcagaagagcagaagagcgcactcgcgtttttaaatcgaggccagccatcaagttctaacgcagggaacaagaggttgagtaccatagatgaatccggcagcatactgtcggacatttcgtttgacaaaacagatgagagtctggactgggactcctcattggtgaaaaccttcaagctcaagaaacgtgaaaaacgtcggagtacctcccggcagttcgtggacggcccacccggtcctgtgaagaaaacccgaagtatcggcagcgctgtcgatcagggtaatgaatcaattgtcgcaaagacaactgtaaccgtccccaatgacgggggtcctatagaggccgtgtctacaatcgaaacggtaccatactggaccagatcccgacgaaagaccgggaccctgcagccatggaatagcgatagtacattaaactcccgtcaactcgagccaagaactgagacagactcagtgggcacacctcaatcaaatggaggcatgaggctccacgatttcgtaagcaaaacggtcatcaaaccggagtcatgtgtgccctgcggaaagcgaatcaagtttggcaaactgtcattaaaatgcagagactgccgggttgtcagccatcccgagtgccgggacaggtgccccctgccttgtatcccaaccctgattggaacaccagtcaaaataggcgagggcatgttagcagattttgtgagtcaaacatcacctatgatccctagcattgttgtccactgcgtgaatgaaatcgaacagaggggcctgacagaaaccgggctctatagaatttcaggctgtgatcggactgtaaaggagctcaaggaaaaatttctgcgcgtgaagaccgtgcccttgctaagcaaggtggatgacattcacgctatctgcagcctcctgaaagactttctcagaaatctgaaagagccattgctgacatttcggcttaaccgagcattcatggaagctgcagagataactgacgaggacaactctattgcagctatgtatcaggcagtaggagaactccctcaggctaatcgggatactctggcatttctaatgatccacctacagcgggttgcgcaatccccacacactaagatggacgtggcgaacttggcaaaggtgttcggacctaccatcgtcgcacacgccgtccccaatcctgatccagtgaccatgctgcaggacataaagaggcagcccaaggtggtggagagactgctgtctctgcctctggaatattggagtcagttcatgatggtggaacaagagaatatcgaccctcttcacgtcattgaaaacagtaacgcatttagtactccccagacaccagacataaaggtgagtctgctgggaccagtcacaaccccggagcaccagctgctcaaaacacccagcagctccagcctctcccaacgcgtaaggagcaccctgactaagaacacgcccagattcgggtctaagtctaaatccgccaccaatttaggacgccaggggaacttttttgccagcccaatgctaaaatag

SEQ ID NO: 30706 - DNA, 585 bp, synthetic construct
  source 1..585: mol_type = other DNA; note = Synthetic coding sequence
atggaggatcttttcgagacattccaggacgaaatggggtttagtaacatggaagatgacggcccagaagaagaggagagggtggctgaaccccaggctaattttaacacaccccaggctttgcgttttgaagagcttcttgcaaacctgctcaatgagcagcatcagatcgcaaaggaactcttcgaacagcttaagatgaagaagcccagcgcaaaacagcagaaggaggtggaaaaagtgaaacctcagtgcaaggaagtgcaccagacattgatcttggaccctgcacagaggaaacgattgcagcagcagatgcaacagcatgtccaactgctgactcagattcatctgttggccacgtgtaaccctaacctgaaccccgaggcatcctccactcgcatttgtcttaaagaactagggacattcgcacaatcatccattgccctgcaccaccaatataaccctaagttccagacactgttccaaccttgtaatcttatgggcgctatgcagctaatcgaagacttttcaacccatgtgagcatagattgtagcccgcataagactgtgaagaagacctag

SEQ ID NO: 30707 - DNA, 1803 bp, synthetic construct
  source 1..1803: mol_type = other DNA; note = Synthetic coding sequence
atggttctgatcctcggcaggcggctgaatcgcgaagatttaggcgttcgggattcccccgcaaccaagaggaaagtgttcgagatggaccctaaatcactgactgggcatgaattttttgatttctcctctgggagcagtcatgccgaaaacatcctgcagattttcaacgagttccgggatagtaggctgttcactgatgtaatcatatgtgtggaggggaaggaatttccatgtcacagggctgtgctgagcgcgtgctccagctacttcagggccatgttttgtaatgaccatagggagtcacgcgagatgttagttgagataaacggaattttggccgaggccatggaatgtttccttcagtacgtttacactggcaaggtcaagataacaacagaaaatgtgcagtacctcttcgaaacgtcctcccttttccagatatcggttttgagggatgcatgtgccaagtttttggaagagcaactcgatccatgcaattgtttagggatccaacgctttgctgacacacattcacttaagacgctgtttacgaaatgtaagaattttgcactgcagacttttgaagacgtctcccagcacgaagagttccttgagctggacaaggacgagcttatagattacatctgctctgatgaactcgttattggtaaagaggagatggtgttcgaagccgtgatgaggtgggtgtatcgcgcagttgatctgcggaggcccctgctccacgagctgctgacgcacgtgcgcctgcctttgttgcaccccaattactttgtgcagaccgtggaggtggatcagctgatacaaaatagccctgaatgttaccagttattgcacgaggcaagaagatatcacatcttaggcaacgaaatgatgtctccacgcacaaggcctcggaggagtaccggctacagcgaggtgatagtggtcgtgggcggatgcgaacgcgtgggagggtttaacctgccgtacacagagtgttatgatcccgtcaccggggaatggaagagcctggctaagcttcctgaatttaccaaatcagaatacgccgtctgtgcgctgagaaatgatatactggtgagtggcggtcggatcaattcacgcgatgtgtggatatacaacagccagctcaacatttggattagagtggcatcccttaacaaaggtcgatggcgtcacaaaatggctgttctactgggcaaagtgtacgtggtgggagggtatgatggccaaaacaggttgtcgagcgtagagtgttatgattccttcagtaatcggtggaccgaagtggcacctcttaaggaagccgtttccagccccgcagtcacgagctgcgtagggaagctgttcgtcatcggcggtgggccagacgacaacacttgctcagataaagtgcagtcctatgaccctgagactaattcttggctgctgagggccgctatccccatcgcaaaaagatgtatcacagccgtcagcctaaataatctgatatacgtggccggtggcctcacaaaggcaatatactgctacgatcccgtcgaagactattggatgcacgtccagaacactttcagtcgccaagagaactgtggaatgtctgtgtgcaacgggaagatctacattctcggaggacggagagagaatggcgaggctacagatacaatattgtgttacgaccctgcaaccagcatcatcacaggtgtcgcagccatgcctcgtcccgtcagttaccatgggtgcgtgacaattcatcgttacaatgaaaagtgttttaagctctag

SEQ ID NO: 30708 - DNA, 1620 bp, synthetic construct
  source 1..1620: mol_type = other DNA; note = Synthetic coding sequence
atggccacctccgccccactgcgctccctcgaggaggaagtgacctgttcaatctgcttggattaccttagggaccccgttacaatagattgcgggcacgttttttgccggagctgcaccactgatgtgcgcccaattagcgggagtagacccgtgtgcccactgtgtaagaagccctttaaaaaggagaacatccgacctgtttggcagctagcaagtctggtggagaatatcgaaaggttaaaagtggacaaaggacgccaacctggggaagtgacacgtgaacaacaagatgctaagctgtgcgaaagacacagggagaaactacactactattgcgaagatgatgggaaactgttgtgcgtgatgtgccgcgagtccagagaacatagaccacacacggctgtcttaatggagaaagccgctcagccgcatcgcgaaaagatcctcaaccatttaagcacccttcggagggaccgggataaaatccagggcttccaagccaagggcgaggcggatatcctcgcggcactaaagaagctccaggatcagcggcagtatatcgtagctgagttcgagcaagggcaccagttcctgcgagagcgggaggagcatttgctggaacagctcgccaagctggagcaggagctcacagagggtcgggagaagttcaaatcccgcggtgtgggagaactcgctcgcctggctttggtcatctctgaactggagggcaaggcccagcagcccgctgctgaacttatgcaggacactcgcgactttctcaatagataccccaggaagaaattctgggtgggaaaacctattgcacgagtcgtaaaaaagaagacgggagagttttccgataagcttctcagcctccagcggggattgcgagaatttcaggggaagttgctgagagatctggaatataaaactgtgtctgtcactctggatccgcagtcagcttcaggctacttgcagctgtccgaggactggaagtgcgttacttatacatcgctctataaaagtgcctacctgcacccacagcagttcgattgcgaacctggggtgctgggctccaagggatttacatgggggaaggtgtattgggaagttgaggtggagcgggaagggtggtccgaggatgaggaggagggtgatgaggaggaggaaggagaggaggaggaagaagaggaagaagcagggtatggtgacggttacgatgattgggagactgatgaagacgaagagtcactcggggacgaggaggaggaggaggaggaggaagaagaggaggtactggagtcctgcatggtgggtgtggcacgcgattcagtcaagcggaagggggatttgtcactgcgcccagaggatggcgtgtgggccttgcgactatctagttccggaatctgggccaacacctcccccgaggcagaactgttcccagcgctcaggcctagaagggtggggattgctcttgactatgagggcggtaccgttacgttcacgaatgccgaatcgcaggaattgatctacaccttcactgctacgtttactaggcgactcgtcccttttctgtggctcaaatggccaggcactaggctgctcctgaggccgtag

SEQ ID NO: 30709 - DNA, 567 bp, synthetic construct
  source 1..567: mol_type = other DNA; note = Synthetic coding sequence
taatatgtgaacgcggtcgactcccggtggagttcatatggcaacgaggcgacgtcatccgcacattacgtggagcgtgacaggttcatcgtcactgacttaagcggacatcgtaagcatagttccactggtgacctgctgtctttagaactacaacaggcgaagtctaattccctcctgctgcagagagaggctaacgccttggcgatgcagcaaaagtggaacagtctcgatgaagggaggcacctgacattgaacctgctgagtaaggagattgaactgcgcaacggcgaactccagagcgactatactgaggatgcgactgataccaaacctgatcgcgatattgagttagaattgagtgcactggacacagacgaacccgacggccagtctgaacccatcgaggaaatattggacattcagctgggtatctcctctcagaatgatcaattgcttaacgggatggctgtggagaatggccaccccgtgcagcaacatcaaaaggaaccccctaagcagaagaagcagagcctcggcaggtccaagaaacagttctgtaggtag

SEQ ID NO: 30710 - DNA, 1806 bp, synthetic construct
  source 1..1806: mol_type = other DNA; note = Synthetic coding sequence
atggaagaaactatgaagttagccaccatggaagataccgttgaatattgtttgtttctcattccagacgaatcccgagactcagataagcacaaagagatactgcaaaaatacattgaacgaataataacgcggtttgctccaatgctcgttccctatatatggcagaaccagccgttcaacctgaagtacaagccaggaaaaggcggtgtgcccgcacatatgttcggagtgaccaaattcggggataatatcgaggatgagtggtttattgtgtacgtgattaaacagattactaaggaatttccagagctggtggccaggatcgaagacaatgacggcgaatttctgctgatcgaggccgctgattttcttcccaaatggctggatcccgagaactccaccaatagagtcttcttctgccatggcgaactgtgtattattcctgctcctagaaaatcgggggcagaaagttggctgcccactacgccaccaaccattcctcaggcattaaatatcattaccgcccattcagaaaaaatcctggcaagtgagtccatccgcgcagcagtaaataggcgtatcagaggctaccccgagaaaatccaggccagtctgcatcgcgcacactgcttcctgcctgcagggattgtagctgtgctgaagcagaggcccagacttgttgcagccgctgtgcaggcattttatctccgggatcctattgatctacgcgcttgtagggtgtttaaaacattccttcctgagactaggataatgacctcagcccatggatttgagattctgtgtagcaaatgttcccctcatttttcggactgcaagaagagcctggtcactgccagtcccctgtgggcttcttttctggaatccctcaaaaaaaatgattattttaagggcctgatcgaagggtctgcccagtacagggagcgcctggagatggcagagaactactttcaactctctgtggactggcctgagagctccctggctatgtcgccaggtgaggagatcctgacgctgttgcagacaattccttttgacatcgaagatctcaagaaagaagcggcaaatctgccgccagaggatgacgatcaatggttagatctgtcgcctgaccagctggaccagctgctgcaggaagctgtcggaaagaaggaaagcgagtcagttagcaaggaggagaaggagcagaattatgatctcacggaggtgtccgagagcatgaaagcgttcatttcgaaagtgtcgacacataaaggggctgaattgccgagagaaccttctgaggctcctataacatttgatgctgacagctttctgaattacttcgataagatccttggtccgcgacccaatgagagtgatagcgacgacctagatgatgaggattttgagtgtctcgattctgatgacgacctggacttcgagacccatgagcccggagaagaagcttccctcaagggtacccttgataacttgaagtcttacatggctcaaatggaccaggagctggctcacacatgtatctccaagtcatttacaacccgaaatcaagtcgagccagtatcacagacgactgataataattcagacgaggaggactctggaaccggcgaatcagtgatggcgcctgtggatgtggatttgaatctggtgtccaacattttggaatcatacagctcccaggcagggctggctggtcccgctagtaatttactgcagagcatgggagttcagttacccgataacactgaccaccgccctacttccaagcccacgaaaaattag

SEQ ID NO: 30711 - DNA, 405 bp, synthetic construct
  source 1..405: mol_type = other DNA; note = Synthetic coding sequence
atgaagaagaaacatgacgggatcgtttacgagacaaaggaggtccttaatccatcgccaaaagtgacccactgttgcaagagcctatggctgaagtacagcttccaaaaggcttacatgacccaactggtgagctctcaacccgtgccggctatgtcacggaaccccgaccataacttgttgagccagccaaaggaacacagcatcgtccagaagcaccaccaggaggagatcatccacaagctcgccatgcagcttcggcacattggcgataatatcgatcataggatggtgcgcgaagacctacaacaggacggcagggacgcgcttgatcattttgtcttttttttttttcgcagggtacaggttcttctacactttttctggaataatcacttactgtag

SEQ ID NO: 30712 - DNA, 1791 bp, synthetic construct
  source 1..1791: mol_type = other DNA; note = Synthetic coding sequence
atggaagatgcgccacagagacttcgctggcaggcacacctggagttcacccataatcatgacgtcggagatcttacctgggacaagattgcggtgagcctgccccgaagcgaaaagcttagatctctggtgttggcgggaatacctcatggaatgaggccacagttgtggatgaggctttctggtgcactgcagaaaaaaaggaatagtgagctttcttatcgcgaaattgtcaagaatagctctaacgatgaaaccatcgcagcaaagcagattgagaaagacttactgaggaccatgccatcgaacgcctgctttgcgtctatgggctcaataggcgtgccccgactgagacgagttctccgcgctttagcttggctgtacccggagatcggctactgccagggtactggtatggtggcggcatgcctcctccttttcttagaagaagaggatgcattttggatgatgtccgccattatcgaggatctcttacccgcatcttatttcagcaccactcttcttggggtgcagaccgatcagagagtgctgcgtcacctcatcgtccaatacctaccacggctggacaaactgctccaggagcacgatatcgaattatccctcataacgctgcactggttcctgacagccttcgcatcagtggtagatattaagctgctgttgcgcatctgggacctgttcttctatgagggttcacgggtcctttttcaactgacattaggcatgttacacctaaaagaagaggagttgattcagtccgagaactctgctagcatctttaacacgctctcagacattccttcccagatggaagacgccgagttgctccttggcgtggctatgaggcttgctggctctctgaccgacgtggctgttgagacccaacggagaaaacacctagcctatctgatcgctgatcagggtcaactgttgggagccggtacgctaacaaatctcagccaggtcgtgcggagacgcactcaacgccgaaaaagcacaattaccgcacttctgttcggagaagacgatctggaggctctgaaggctaaaaacattaagcagacagagcttgtcgctgatctgcgggaggcgatcctccgcgtggctcgacattttcagtgtacagaccccaaaaattgctccgtggaactaactccagactactccatggagtcacatcagcgcgaccatgagaattacgtggcctgttcacggagccatagaaggagagccaaggcgttactggattttgaacgccatgacgatgatgaactagggtttcggaaaaacgatattatcactattgtgtctcagaaagacgagcattgctgggtgggtgagctgaacggattgcgaggttggtttccagccaagtttgtcgaggttctagacgagagatctaaggagtatagtatcgctggcgatgactcagtgaccgaaggcgtgaccgacctcgtgcgtggcacactgtgccccgctctgaaggccttattcgaacacggcctgaagaaaccgtctttactcggaggagcttgtcacccctggctatttatcgaggaggctgcaggaagggaagtagaacgtgacttcgcctccgtatactcgagactggtgctgtgcaagacgttcagattggacgaagacggcaaggtgctgacccctgaggagctgctttacagggccgttcagtccgtaaacgttactcatgatgccgtgcacgcacagatggatgtgaagctgcggtccctgatttgcgttggcttaaaatag

SEQ ID NO: 30713 - DNA, 399 bp, synthetic construct
  source 1..399: mol_type = other DNA; note = Synthetic coding sequence
atggaatccagggtggccgatgccggaacaggagagactgccagagccgctggcggaagcccagccgtggggtgcaccacaagaggcccagtagtgtccgccccattgggagctgcccgatggaaacttctacggcaagtgctgaagcagaaacatttagacgattgcctgagacacgttagtgtgagaagatttgaaagcttcaatctcttttcagtgacagaaggtaaagagcgcgagaccgaagaagaggtaggtgcctgggtccaatacaccagcatcttctgcccagagtactctatcagcctccgccacaattctggttcactgaatgttgaggacgtgcttacctcgttcgacaacaccggaaacgtatggtcgttttcccgcggaaaatag

SEQ ID NO: 30714 - DNA, 1620 bp, synthetic construct
  source 1..1620: mol_type = other DNA; note = Synthetic coding sequence
atggccacaagcgcccctctcagaagtcttgaagaagaggtcacctgcagcatctgtctcgactacctgcgagatccggtcacaatcgattgtgggcacgtgttttgtagatcctgcacgacagatgtgcgtccaatttcagggagtaggcccgtatgccctctgtgtaagaagcccttcaaaaaggagaatattagacccgtgtggcagctggcctctctcgtggaaaatatcgagaggttaaaagttgacaagggtcggcagcccggtgaagtcacgagagagcagcaggacgcgaaactttgtgaaagacaccgcgagaagctccactattattgtgaggacgacgggaagctgctgtgtgttatgtgccgggaatctcgcgaacatagaccacataccgccgtcttaatggagaaggcagcccaaccccatagggaaaagatactgaatcacctgagtacactccggagagaccgggataagatccaggggttccaggccaaaggggaggccgatattctggctgccctgaaaaagctccaggaccaaagacagtacattgtagctgagttcgaacaaggccatcagtttttgagggagagagaagagcacctgctggagcaacttgccaagctcgaacaagaacttactgagggacgcgaaaaattcaagagtagaggagtgggggagttggctaggctggcacttgttatttctgaactggaaggcaaggcccagcagccagcagctgagctgatgcaagacaccagggacttccttaataggtacccacggaagaagttctgggtggggaagccaattgcacgagtggtcaagaaaaaaaccggagagttcagcgacaaactgctgagcctgcaacggggactaagagagtttcaaggcaagctgctcagggatttggagtacaagactgtttcagtgacactcgatccccagtccgcttctggctacctgcagctgagtgaggactggaagtgcgtgacctacacttccttatacaagtctgcctacttacatccacagcagttcgactgtgagcctggggtcttagggagtaaaggatttacgtggggaaaagtctactgggaggtggaggtcgaaagggagggatggagcgaagacgaagaagagggagatgaagaagaggagggtgaggaagaggaggaggaagaagaagccggttacggcgatggatatgacgattgggaaaccgatgaggatgaggaatcactgggcgatgaggaggaagaggaagaggaggaagaagaggaggtgctggagtcttgtatggtcggagtagccagagattcagtgaaaaggaagggtgacttgagcctgaggcctgaagatggcgtgtgggcgttacgactgagctcaagtgggatttgggctaataccagtcccgaagcagagctctttcctgctcttaggccgagaagagtcggcatcgcgttggattacgagggcggtaccgtgacattcactaatgctgagagtcaggaattgatctacacgttcaccgcaacatttacaaggcgcctggtgcccttcttatggctcaagtggccaggtacacgcctgctgctgcgcccttag

SEQ ID NO: 30715 - DNA, 2193 bp, synthetic construct
  source 1..2193: mol_type = other DNA; note = Synthetic coding sequence
atgaataactcatcgtctgagactcgcggacacccccattctgcttctagtcctagcgaaagagtgttccccatgcctctcccacggaaagcaccattgaatattccaggaacccctgtgttggaggactttccccagaatgatgacgaaaaagaaagactgcagaggaggcgctcccgtgtcttcgatttgcagttcagcactgattctcctagattacttgcatccccctcctcccgctccattgacatctcagccacaattccgaaatttacaaatacacagatcactgagcattatagcacatgcatcaagctcagtactgagaataaaattactaccaagaacgccttcggcttacacctcatagatttcatgtcagaaatcctaaagcagaaggatactgagcctacaaatttcaaggtcgcggcagggacactggatgccagtacgaagatctatgccgttcgcgtggatgctgttcacgctgacgtctacagagtgctgggcggactggggaaggacgctccatccctcgaggaagtggagggacacgtggccgatggcagtgcaactgaaatggggacaactaaaaaggctgtcaagccgaaaaaaaagcacctgcaccggaccatcgaacagaatattaacaatttgaatgtttcagaggccgacaggaaatgcgaaatcgaccccatgttccagaagacagcggcttcctttgacgagtgtagcacagcaggagtcttcctcagcacacttcactgtcaggactaccgatcggaactactgttcccttccgatgtccagacgctgtctacgggcgagcctctcgaacttcctgagctggggtgcgtagaaatgaccgatctgaaggccccactgcagcagtgtgccgaggataggcaaatctgcccaagtctggccggtttccaattcacccagtgggacagtgaaacccacaacgagtctgtgagcgcgttggtagataagttcaagaagaatgatcaggtgttcgatatcaacgctgaggtagatgaaagcgattgcggtgattttccagacgggagcctgggagatgactttgacgcaaatgacgagccggaccacaccgcagtgggcgatcatgaagaatttcgttcctggaaggaaccctgccaggtgcagagttgccaagaagagatgatctcactgggcgatggtgatatccggacaatgtgcccactgctgagtatgaaacccggagaatattcctacttctcccccaggaccatgtcaatgtgggcgggtcccgaccattggcgcttcagaccgaggcggaaacaggatgcgcctagccaatccgagaataaaaagaaaagtactaagaaggactttgagatcgacttcgaagacgacatcgactttgatgtctatttcagaaagactaaggcggcaactatcttgacgaaatccacgttggaaaatcagaattggcgagcgaccactctccctactgactttaattacaatgtggacaccctcgtgcagcttcacttgaagcctggtacccgtttattaaagatggcccaggggcacagagtggaaactgagcattacgaagaaatcgaggattatgactacaacaaccctaacgatacctctaacttttgtccaggcttgcaggccgctgatagcgatgacgaggacctcgacgatctgttcgttggccctgtggggaactctgacctgagcccatatccttgccacccacccaaaacggctcagcagaatggagataccccagaagcccaggggttagatatcacaacgtacggcgagtcaaacctcgtagccgagcctcagaaggtcaacaaaattgagatccattacgctaaaactgctaagaaaatggacatgaaaaagctgaagcagtccatgtggtccctgcttactgcactctctgggaaggaagccgatgctgaggcgaaccacagggaagccggtaaagaagcggctctcgccgaagttgctgatgagaagatgctttcaggcctgacaaaggaccttcagcgttcactgccaccggtcatggcccagaacctcagcatccctttagcattcgcctgccttctgcatcttgccaacgagaaaaatctcaagctggagggaacagaggatctgtccgatgtgctcgtgcgccagggagactag

SEQ ID NO: 30716 - DNA, 900 bp, synthetic construct
  source 1..900: mol_type = other DNA; note = Synthetic coding sequence
atggagacccagttccccgtgagtgagggaaaagttgatccttacaggtcctgcggattctcatatgagcaagatcccacccttcgcgaccctgaggccgtagcaagaaggtggccttggatggtgtctgtgagggcaaatggcactcatatctgcgccggaaccatcatcgccagccaatgggtgttaactgtggctcactgtctgatttggcgggacgtgatctactcggttcgcgtggggtccccttggatagaccagatgactcaaacagcttcagacgtcccggtgctacaagttattatgcactcaaggtatcgtgcacagcgcttctggtcttgggtggggcaggcaaatgacataggattactcaaacttaagcaggagcttaagtacagcaactatgtcagacctatttgtctgcccggaactgattacgtgttgaaagaccatagccgctgcacggttacgggatgggggctgagtaaagccgacgggatgtggccacagtttcgcacaatacaggagaaagaagtgatcattctgaacaataaggagtgtgacaatttttaccacaactttacaaagatcccaaccctggtccaaataattaagtcccagatgatgtgtgccgaggatactcacagagagaagttctgttatgagctgaccggggagcccttagtgtgtagtatggaaggcacttggtatcttgtggggctggtcagctggggcgcaggatgtcaaaagagtgaagctccacctatatatctgcaggtgtcaagctatcagcactggatttgggactgcttaaacggccaggccctcgcgctcccagcgccttccagaaccctgctgctggccttacctctgccactctcacttctggctgctctctag

SEQ ID NO: 30717 - DNA, 1089 bp, synthetic construct
  source 1..1089: mol_type = other DNA; note = Synthetic coding sequence
atgttggtccctggatctacgaggccctatagcaaaaaaagacaaaactcaaagagtgcccaaggattggcgggactgcgtaatcttggaaacacatgctttatgaactcaatcctccagtgcctaagtaataccagagaactcagagactactgcctgcagcgcctttacatgagagatttacaccacggatccaatgcacataccgctctggtagaagagtttgcaaaattgattcagactatatggacaagtagccccaacgatgtcgtttctccttcggagtttaagacgcagatccagcgctacgccccacgattcgtgggctacaatcaacaagacgcccaggaattcctgagattcctattagatgggttgcataacgaagtgaatcgcgtgactctcagacccaaatcaaaccctgaaaaccttgaccatctaccagatgatgaaaaggggaggcagatgtggaggaagtatctggagagagaggattccaggattggagacctgttcgtgggtcagttaaaatcatccctgacttgcacagactgtgggtactgcagcacggtgttcgatccattctgggacctgtctctgcctattgctaagaggggttatccagaagtgacgttaatggactgtatgaggttatttactaaagaagacgtgctcgatggggatgagaagcctacttgctgccggtgtagggggagaaagcgctgcattaagaaatttagtatacagagattccctaaaatcctcgtacttcacctgaaaagattttctgaatctcgtattcggacttcaaagctcacaacttttgtaaactttccattaagggatttagacttgagggaattcgccagcgaaaacaccaaccacgcagtgtataatttatacgccgtgagcaatcactccggcactacgatgggaggccattatacagcatattgccgaagtccaggtaccggtgaatggcataccttcaacgactctagcgtcaccccaatgtcttcctcacaggtgcgtacctctgatgcctatctcctgttttacgagctggcctcacccccttctaggatgtag

SEQ ID NO: 30718 - DNA, 1800 bp, synthetic construct
  source 1..1800: mol_type = other DNA; note = Synthetic coding sequence
atggaccccggtgacgcagccatactggagtcgagcctgaggatcctttaccggttgttcgagagtgtgctgccaccccttcctgcggctctccagtcaagaatgaatgtgatcgatcatgttcgggacatggccgctgctggcctgcactctaatgtacgcctcctctctagtcttttgttaacaatgagcaacaataatcctgaactattctctcctcctcagaagtaccagctcctcgtgtatcatgcagatagcctatttcatgataaagaatatagaaatgccgtcagtaaatatacgatggccctgcagcaaaagaaagctctgtccaagacctctaaagtgcgcccatctaccgggaatagtgcaagtaccccccagtctcaatgcctcccttctgagattgaggtcaagtacaagatggccgaatgttacactatgctgaaacaggacaaggatgctattgcaatactggacggtataccctcccgccagcggacccctaaaatcaatatgatgctcgcaaatctgtacaagaaggccggtcaggagagaccttcagtcactagttataaggaggtgctccgccaatgtccactcgccttggacgcaatattgggactgctgagcctgagcgtgaaaggagccgaagtggcatccatgacgatgaatgtgatccagacagtgcccaatttggactggcttagtgtctggataaaggcttacgcctttgttcataccggcgataacagccgagctatctccaccatttgcagtctcgagaagaagtctctcttgcgcgacaacgtggacttgttaggcagtctggcagatctatacttccgagctggggacaacaagaactcagtgctcaaatttgaacaagcccagatgctggatccatacctgatcaaggggatggacgtttatggctatctgctcgctcgagaaggacgtttggaagatgtggaaaatctcgggtgcaggctgttcaacatcagcgatcagcacgccgagccatgggtcgtgagtgggtgtcactccttctacagcaagaggtacagccgggctctataccttggggcaaaggccatacagttgaacagtaatagcgtccaggccttactcctgaagggagcggcactgagaaacatgggaagagtacaagaggctatcattcactttagggaggcaatcaggttggctccatgcaggttagactgctatgagggactcattgaatgctatctagcatccaactccattagagaagcaatggtgatggcaaacaacgtgtacaagacactcggagcaaacgcgcagaccctgacattactcgctactgtttgcctcgaggaccccgtgacccaggagaaagctaaaactttgttggacaaggccttgacacagagaccggactacatcaaagccgtggttaaaaaagccgaattgttatcacgggagcagaagtacgaggatggaatcgctttactacggaacgcactggcaaatcagtccgactgcgtgttacacaggatactgggggatttcttggtagctgtgaacgaataccaagaggccatggatcagtactctattgctctgtcactggatccaaacgaccagaagtccctggagggaatgcaaaaaatggagaaggaggagtcacccacagatgccactcaggaagaggatgttgacgacatggagggaagcggcgaggaaggggatctggagggctctgactccgaagcagcacagtgggccgaccaggagcagtggttcggaatgcagtag

SEQ ID NO: 30719 - DNA, 507 bp, synthetic construct
  source 1..507: mol_type = other DNA; note = Synthetic coding sequence
atgcctgccacccggaagccaatgagatacgggcacacggagggccacacagaagtgtgtttcgacgattccggctcgttcatcgtgacgtgcgggagcgacggagacgttagaatttgggaggacttggacgatgacgatccaaaatttattaatgtgggagagaaggcatattcatgtgccctgaaatctggcaagctcgtcacagccgtatctaacaacacaattcaggtgcatacattccctgagggagttccggatgggatcctcacacggttcacgaccaacgcaaatcacgtggtatttaatggtgatggcaccaaaatcgcggcaggctctagtgactttctggtgaaaatcgtggatgtgatggactcaagtcagcaaaaaacattccgaggtcacgatgctcccgttttgagcctgtcttttgatcctaaagacatcttcctggcctctgcctcttgcgatgggtccgttagggtctggcagattagtgatcagtag

SEQ ID NO: 30720 - DNA, 141 bp, synthetic construct
  source 1..141: mol_type = other DNA; note = Synthetic coding sequence
atggtgaactcttgttgtggatccgtttgctcagatcagggctgcggactcgaaaattgctgtcgaccgtcctgttgccagaccacttgctgtcggaccacatgttgccggccattgtgttgtgcatcgtcatgttgctag

SEQ ID NO: 30721 - DNA, 669 bp, synthetic construct
  source 1..669: mol_type = other DNA; note = Synthetic coding sequence
atggccagcgtagttgaatataaaggtctgcgggctgggtaccactgcgggtattgcgattcaaaggaaggcaaggctagttgtggaatgtgggcccatagcatgactgttcaggactaccaggatctcatcgaccgaggctggcgtagaagcggtaagtatgtttataaaccagtgatgaaccagacatgttgtccgcagtataccattaggtgcagaccactccagtttcagccatccaagtctcacaaaaaggtcctgaagaagatgctgaagttccttgcgaaaggagaggtcccgaagggttcgtgcgaagacgaacccatggatagtacaatggatgatgctgtggccggtgatttcgcactcatcaataaactggatattcagtgcgatttgaaaacactgtccgatgacattaaagagagtcttgagtcggagggtaagaactcaaagaaggaggaaccacaggagctgctccagagtcaggatttcgttggagagaagctcggcagcggtgagccctcacatagtgtgaaggtacacacagtgcccaagcctggaaaaggagccgacctttcaaagcccccatgcaggaaggcgaaagagattagaaaagagcgcaagcgccttaaactgatgcagcaaaacccggctggagagctttag

SEQ ID NO: 30722 - DNA, 495 bp, synthetic construct
  source 1..495: mol_type = other DNA; note = Synthetic coding sequence
atgcttaaggccgtgatcctgattggcggtcctcagaaaggcactagatttagaccactctccttcgaagttcctaaacccctgttcccagtggccggagtcccaatgattcagcatcacatagaggcctgtgcccaggtcccaggaatgcaagaaatattactgattggtttctaccagcccgacgaacccctcacccagtttctcgaagccgcacagcaggagttcaatctacctgtgcgctaccttcaggagtttgcgccactggggaccggtggaggactgtaccactttcgggaccaaatcctcgccggatctccagaagcattttttgtgctcaatgccgatgtgtgtagcgacttccctctgagtgcaatgctggaggcgcacagacgacaaagacatccttttctgctgctgggaacaactgctaacagaactcagtctctaaattacgggtgcatcgtcgagaatccacagacacatgaagtgtag

SEQ ID NO: 30723 - DNA, 339 bp, synthetic construct
  source 1..339: mol_type = other DNA; note = Synthetic coding sequence
atgttcgtgagtgatttccgtaaggagttctatgaagtggtgcagtcacaaagggtcctactgttcgtcgcatcggatgtggacgccctctgtgcctgcaagattctccaagccctcttccagtgtgatcacgtccagtataccctggtgccagtatcgggctggcaggagctggaaactgcctttcttgagcacaaagagcagttccactacttcatccttattaactgcggcgctaatgtcgacctcctcgacatccttcagccggacgaagatacaattttcttcgtttgtgatacccaccgtcctgttaatgtagtgaatgtgtacaacgattag

SEQ ID NO: 30724 - DNA, 942 bp, synthetic construct
  source 1..942: mol_type = other DNA; note = Synthetic coding sequence
accttggttgtgtcaggtagagacgaccctcccacacactctcaacccgactcagatgacgaggctgaggagatccagtggagcgatgacgaaaataccgccacactcaccgcaccagagttcccggagttcgccacaaaagtgcaagaggctatcaactcactcgggggaagcgtgtttcctaagctgaattggagtgctccgcgagatgcctactggattgccatgaattcttctctcaagtgtaaaaccctatccgatatattcttattattcaagtctagcgacttcatcacacgtgatttcactcagccttttatacactgcactgacgatagtccagatccctgtatcgagtacgagctggtgctgaggaagtggtgtgagttgattccgggagcagaattccgctgtttcgtgaaagaaaataagcttattggcatcagtcagcgagattacacccaatattacgaccacatttctaaacagaaagaggagatcaggagatgtatccaggatttctttaagaagcacatccagtacaaattcctggatgaggacttcgtattcgatatttatagggattccagggactcaccagctttccgatgtacaaactccgaagtgactgtgcagcccagcccctacctgtcgtatcggctgccaaaggacttcgtggacttgtctacaggggaggatgcacacaaactgatcgataagtccgccggtgggagactcatgtccgtgttagaactggagaagaggcggcctcgccctaccgcccctggagcagcccatcagccccagcttcccgctgacccggatgcaggcggtcccagctccgtggatatttcccacttcctctatagctgcacttttacctggggtaagaagaggagggactttgccacgtgcaaaaataacatcatcaacaggtcttag

SEQ ID NO: 30725 - DNA, 1017 bp, synthetic construct
  source 1..1017: mol_type = other DNA; note = Synthetic coding sequence
atggagctgtggggaaggatgctatgggcactactcagcggaccaggtaggaggggcagtacacgcggttgggccttctcaagctggcagccacaaccacccctggcaggcctcagctccgcaattgagctggttagtcattggacaggtgtattcgaaaaacggggaattccagaagcaagggaatccagcgagtatattgtagcccacgtcctgggtgccaaaaccttccagagcctgagacctgctctctggacccagcccctgacatcccagcagttgcagtgtatccgggagttgtccagccggaggttacagaggatgccggtgcagtacatactgggcgagtgggacttccagggactgtccctgagaatggtcccaccagtgttcattcctagaccggagactgaggagttagtagaatgggtcctggaagaggtggcccagcggagccacgctgttggttcccccggatctcctctcattctcgaggtgggctgtggctcaggtgccattagcttgagcctgctgagccagctgccccaatctcgggtgattgcagtggacaagagagaagctgcaatctctctcacccacgaaaatgcccagcggctacggctccaggaccgaatttggatcatccacttagatatgacctccgaacggtcctggacacacctgccatggggccctatggacttaatcgtttctaacccaccttacgtcttccatcaggacatggaacaactggcacctgagatacgatcttatgaggatccagccgctctagatggaggagaggagggcatggatattatcacacatattttggctctggcgcctcggctcctgaaggatagtggctcaatcttcctggaggtagaccctagacaccctgaactcgtgtcgagctggctgcaatctagacctgacctatatctgaacttggttgccgtgcgcagagatttctgcgggagaccccgatttctgcatataaggagatcaggaccatag

SEQ ID NO: 30726 - DNA, 1119 bp, synthetic construct
  source 1..1119: mol_type = other DNA; note = Synthetic coding sequence
atgaaaaggcgtactgacccagagtgtacagcccctatcaaaaagcagaagaagcgggttgccgagctggcgctgtccctgtcttcgacctcggacgatgagcctccttcttccgtctctcatggagcgaaggctagcacaacctccctgtctggtagcgatagcgaaacagagggcaagcagcattcgtcagactcattcgacgacgcctttaaggcggatagtctggttgaagggacaagttccagatactcgatgtacaacagcgtgagtcaaaaattaatggctaagatggggttccgtgaaggagaaggcctggggaagtactctcaaggtcggaaggacattgtagaagccagctcccaaaaagggaggcggggactaggactgacgctacgcggatttgatcaggagctcaatgtagactggcgcgatgagcccgaaccaagtgcttgcgagcaagtgagttggttccccgaatgtactaccgaaatcccagacacccaggaaatgtccgactggatggtcgtcggcaaaagaaagatgatcatcgaagacgagaccgaattctgtggtgaggagctcctgcatagcgtgctccagtgcaagaagccccttgtcaaggatagagaggctgaactactgtacttcgccgatgtctgcgcagggccaggtggcttcagcgagtatgtcttatggcgtaagaagtggcatgctaaaggcttcgggatgactttaaaggggccaaacgacttcaagttagaagacttttattccgcttcttcagagttattcgaaccatattacggggagggagggattgacggggacggagatatcacccgtccagaaaatatatcggccttccgcaacttcgtcctagataacacagatcgtaagggcgtccattttctcatggctgacgggggattttctgtggagggacaagagaatctgcaggagatcctcagtaagcagctgttactgtgtcagtttctaatggctctgtcgatcgtgaggaccggtgggcactttatttgcaaaacctttgacctgttcacacccttctcagttggactggtttacctcctgtattgctgctttgagcgagtctgctag

SEQ ID NO: 30727 - DNA, 408 bp, synthetic construct
  source 1..408: mol_type = other DNA; note = Synthetic coding sequence
taacagttagcatcgatggtgtggaacaatccttctcagcagcagtttatgcagttcggcggatccagtggctcccaactgccgcaaattcagactgacgtggtattaccttcttgcaaaaagaaggctccagctgagactcccgtgaaagagcggttgtttatcgtctttaaccctcaccctcttccactggacgtgctggaagatattttctgcagatttggcaacctcatcgaggtttatcttgtttctggaaaaaacgtcggatacgcaaagtacgcggaccgcatttcggccaacgacgccatcgcaacattgcacggaaaaatattaaacggagtgagattaaaagtgatgctcgcggattcgcctcgggaggaaagtaataagagacagagaacatattag

SEQ ID NO: 30728 - DNA, 1764 bp, synthetic construct
  source 1..1764: mol_type = other DNA; note = Synthetic coding sequence
atggcctcggaagacatcgctaagctggcagagaccctggccaaaacacaggtggccggaggacaattaagctttaagggtaaaagtctcaaattgaacactgccgaagacgctaaggatgtcattaaagaaatcgaggatttcgatagcctcgaagccctgagactggaggggaataccgtgggggtagaggccgctcgagtgatagccaaagctcttgagaaaaagagcgagctgaagcgttgccattggtcggatatgttcacagggcgactgcgtacagagatccctccagctctgatctccttaggcgaaggtctgatcaccgccggtgctcagttggtggagctcgacttgtcagataacgccttcgggcctgatggagtacagggctttgaggccctactgaagtcttctgcctgcttcacactgcaagaattaaaactgaacaattgcggcatggggattggcggtggaaagatcctggcagcagcgctcacggagtgccacagaaaatcatcagcacaaggcaaacccttagctctaaaggttttcgtcgccggtcgtaacagattggagaacgatggtgctacagccctggctgaagcatttcgcgtgatcggaaccctagaagaagtacacatgccccagaatggtatcaatcatcctgggattaccgccctcgcacaagccttcgccgtgaaccccttacttcgcgtgatcaatctcaacgataacacattcaccgaaaagggagctgtagctatggccgagactctgaagaccctgcggcaggttgaagtaattaactttggagattgcctggtcagatccaaaggagcagtagccattgctgacgccatccgcggtggacttccaaagcttaaagagttgaatctctccttctgcgagattaaaagggatgcagcgctcgccgtggcggaggcaatggctgacaaggcagagctggagaaactagacctgaatggaaacactttaggtgaggaaggctgcgaacaactgcaggaggtgctcgaggggttcaatatggctaaggtgctggcaagtttaagcgatgacgaggacgaagaagaagaggaggagggggaagaagaggaggaagaggccgaggaggaagaggaggaagacgaagaggaggaagaggaggaggaggaggaggaagaagaggagccacaacagcgaggacaaggtgaaaaaagcgccactccgtcaaggaaaatactcgaccctaatactggggaacccgctcccgtcctatccagtcctccacccgcagatgtctcaacctttttagccttcccttcacctgagaaacttctgcggttgggcccaaaatccagtgtcttaattgcccagcagacggacacaagtgatcccgagaaagtagtgtcagcctttttaaaagtcagcagtgtgttcaaagacgaggcgaccgttagaatggcagtccaggatgccgttgacgccctgatgcagaaggcctttaacagttcttcttttaattcgaatactttcttgaccaggctgttggtgcacatgggccttctgaaatctgaggacaaggttaaggcaatcgccaacttatatgggccattaatggccctgaaccacatggtccagcaggactactttcctaaagccttggcaccacttctcctggcattcgtcactaaacccaactcggcactggagagctgctccttcgccaggcacagcctgctgcagaccctgtacaaagtttag

SEQ ID NO: 30729 - DNA, 1842 bp, synthetic construct
  source 1..1842: mol_type = other DNA; note = Synthetic coding sequence
atggcgaccatcccagactggaaattgcaactcctggcgcgaagacgccaagaggaggcctctgtgagaggcagagagaaggctgaaagagagcgcctcagccagatgcccgcttggaagcgaggactcctcgagcgaaggagagcgaagctcggcctgtctcctggagagccctcacctgtcttgggaacagttgaagcaggcccaccagatccagacgagagcgccgtgctactcgaagctatcggacctgtccatcagaaccgtttcattcggcaggagaggcagcagcagcagcaacagcagcagcgctcagaagaacttctcgctgaaagaaagccagggcctctggaggcgcgagaaagaaggccatccccgggagagatgcgcgatcaatcaccgaagggcagagagtcacgggaggaacgtctgtcccctcgagaaactcgagagagaaggttgggcattggcggtgctcaagaactgtcactacgccctctagaagccagggattggcggcagagtcctggcgaagtcggcgacaggtcctcaagactgtcagaggcctggaaatggaggctctctcccggtgaaacccccgaacggtcactgaggctggctgagagcagggaacagtccccccgacggaaagaagttgaatcaagactgtccccaggagaaagcgcctaccaaaaactcggcctaacggaggcacataagtggcgtcctgactcccgcgaaagtcaggaacaaagcctcgttcagctggaggcgacagagtggagactgcgatctggcgaagaaagacaggactacagtgaggaatgtggacgaaaagaggaatggcccgtaccaggtgtggcaccgaaagagaccgccgaactttccgagaccctgaccagggaggcccaggggaattcatccgcaggagtggaagctgcggaacaaagacccgtagaggatggtgaacggggaatgaagcctactgaggggtggaaatggaccctcaattcaggaaaggctcgagagtggactccccgtgacatcgaagctcagacgcagaaaccggagcctccggaaagcgccgagaaactgctcgaaagtcccggagtggaagccggtgagggcgaggccgagaaggaagaggctggagcccagggaagaccattgagagccttgcagaactgttgtagcgtaccatccccgctgccgcctgaagacgccggtacaggcggtctgagacaacaggaggaagaagctgtggaactacagcctcctccccctgctcccctgagccccccaccacctgcccctacagcccctcagccccctggcgacccacttatgtcgcgtctattctacggtgtgaaggcgggaccaggggtgggtgcaccgagacgatctggccatacgttcactgtgaatcctcgaaggtccgttccgccagccacgccagcaacaccaacgtcccctgccactgtcgacgctgccgttccaggcgctggtaagaaacgatatccaacagccgaggagatcctggtcctgggaggttacctaaggctttctagaagctgcctcgcgaaagggagccctgagaggcatcacaaacagcttaagatttctttttccgaaacagcgctggaaacaacgtaccagtatccgtccgagtcaagcgtgctggaggaattagggccagaaccagaggtaccttctgccccaaacccgcctgccgcacagcccgatgatgaggaggatgaagaagagctgctcttgcttcagcctgagctacaggggggactgcgtactaaagccctgattgttgacgagtcgtgccgtcggtag

SEQ ID NO: 30730 - DNA, 477 bp, synthetic construct
  source 1..477: mol_type = other DNA; note = Synthetic coding sequence
atgacacactgttgcagtccctgttgtcagcccacttgctgcaggactacctgctgcagaaccacctgttggaagcccacaaccgtgaccacctgtagcagtacaccatgttgtcagcccgcatgttgcgtcagcagctgttgtcagccatgctgccgaccaacttgctgccagaatacatgttgccgaacaacatgttgccagcctacatgccccacctgttgcggtagctcttgctgtggacagacttcatgcggatccagctgcggacagtcttccagttgcgctcctgtatattgtcgaaggacatgctattaccctactactgtgtgtctgcccggttgtctaaaccaatcgtgtggctcaaactgttgccagccctgttgccgacctgcttgttgcgaaaccacttgctgtcggacaacatgtttccagcccacttgtgtgtcatcatgctgccagccctcttgctgctag

SEQ ID NO: 30731 - DNA, 1620 bp, synthetic construct
  source 1..1620: mol_type = other DNA; note = Synthetic coding sequence
atggccaccagcgcacctttaagatctttggaggaagaagtaacctgctccatttgtctcgactacctgcgggaccctgttactattgactgtgggcacgttttctgcagatcatgcactaccgatgtgaggccaattagtggctctagacccgtgtgtccactttgcaaaaaaccctttaaaaaagagaatattaggcctgtctggcagcttgcaagtttggtagaaaatatagaaaggctgaaggtggataaaggtcggcagccgggtgaggtgacgcgcgagcagcaggacgcaaagctgtgtgagcggcatcgcgaaaaactccattattattgtgaagacgacgggaagctactttgtgtgatgtgccgagagagcagagaacaccggcctcacaccgctgtcctgatggagaaagcggcacagcctcaccgcgagaagatcttgaatcacctgtcgactttaagacgggacagggataaaattcaaggattccaggctaaaggtgaagctgatatcctcgccgctcttaagaagctacaggatcagaggcagtatattgttgcagagtttgaacagggccaccagttcctaagagagcgtgaggagcacctcctggaacagttggcaaagctggaacaggagctcacagaaggccgagaaaagttcaagagccgcggagttggtgagctggccaggctggcgctcgttatttctgagctcgagggcaaagcccagcagcccgctgctgagctgatgcaagatacccgcgatttcctcaatcggtatcccaggaagaagttctgggttggcaagccgatcgcgagggtagtcaagaaaaagacaggggagttttcggataagctcctctctttacaacggggtctgcgggagtttcagggtaagctactgcgtgacctcgagtacaaaacggtcagcgtaactctggatcctcagtccgcaagtggatacttacagctgtccgaagattggaaatgcgtgacatacacgagcctatataagagtgcttatcttcatccacaacaatttgactgcgagcctggcgtcttaggctctaaaggcttcacctggggaaaggtctattgggaggtcgaagtagagagagaggggtggagcgaggacgaggaggagggagacgaggaggaggagggagaggaagaagaagaggaggaggaggccggttacggcgacggatacgacgactgggagacagatgaagatgaagagtctctgggagacgaggaggaagaggaggaagaagaggaggaagaggtgcttgaaagctgtatggtgggcgtggccagagattctgtcaagaggaaaggagatctgagcttaagacctgaagatggagtgtgggccctgaggctctcatcaagcgggatctgggccaataccagcccggaggctgagctgttccccgcattgaggcctaggagggtggggattgccttggactacgagggcggaactgtaacgttcactaacgccgaaagtcaagaactgatttacacatttaccgccacattcacaagacggttggtcccattcttgtggctcaagtggccgggtacgcggctgttgttgagaccttag

SEQ ID NO: 30732 - DNA, 2511 bp, synthetic construct
  source 1..2511: mol_type = other DNA; note = Synthetic coding sequence
atggccgctgctctggggccaccagaggtgattgcccagctggagaacgccgcaaaggtgctcatgcaaaccctcgcctgctcaattctgactgccctgctgagcgaattctcttcatcatccaagacctccaatatagggctcagtatggagttccacggcaactgtaaacgagtgttccaggaggaagatttaaggcaaatttttatgctcaccgtggaggtactgcaggaatttagtcgaagagaaaacctcaatgcgcaaatgtcatctgtatttcagcggtacttggccctggccaaccaagtcctgagctggaacttcttacctcctaagttagggaggcattatatagccatgttcgaatccagccagaatgtccttttaaaacctaccgagagctggcgagagacactgttagattcgagggtgatggagcttttctttacggtccaccggaagattagggaagattccgacatggcccaagattccctgcaatgcctcgcacagctggcgtctttacatggaccgatcttcccagacgaggggtcccaagttgactacttggcacatttcatcgagggactgttaaataccatcaacggcatagaaattgaggattcagaggccgtcggcatcagctcgatcattagtaacttaatcacagtgttcccccgaaatgtcttgactgctataccttccgagctgtttagctcctttgttaattgcttgacccatctcacctgttcattcgggaggtctgccgctctggaggaagttttggataaagacgatatggtgtacatggaggcgtacgataagctgctggagtcctggttgaccctggtgcaggatgataaacactttcataaggggttttttactcagcacgcagtgcaggtgtttaatagctatatccagtgtcacttagctgcgcctgatggcaccaggaacctgaccgcaaatggagtcgcctctcgagaggaagaggaaatcagcgagctgcaggaggacgaccgagatcagttttccgaccagctggcttcagtggggatgctagggaggatcgctgctgagcactgtatccctctgctgacgtcattgcttgaggaacgtgtcacacggctgcacggccagctccaaagacatcagcagcaattgctagccagtcccggaagttcaacagtggataataaaatgcttgacgatctctacgaagatatccattggctcattctggtgacgggctacttgctcgcagacgatacacagggcgaaacacctcttatcccaccagagatcatggagtactcaatcaagcactctagtgaggtggacattaatactacactgcaaatccttggttctccaggcgagaaggcttctagcatacccggttacaaccgcaccgacagcgtgattaggctgctgtcggctatcctgcgggtgtctgaagtggaaagccgagctattcgcgctgatctgactcatctgctaagtccacagatgggaaaggatattgtgtggttccttaaaagatgggccaagacttatctgcttgtagatgaaaagctgtacgaccagatcagcctgccattttcgacagccttcggagctgacaccgagggctcccagtggattatcggttatctcctccaaaaggtgatctccaacttgtcagtctggagcagcgaacaggatctggctaacgacacggtacagctgttggttaccctcgtggaaaggcgcgaaagagcaaatttggttattcagtgcgagaactggtggaatctggccaaacaatttgctagtagaagccctcccctgaactttctcagttctcccgttcagagaacccttatgaaagctctagtgcttgggggtttcgcccacatggacaccgagaccaaacagcagtactggacagaggtcctgcagcccctgcagcagcggtttcttagggtgataaatcaggaaaactttcaacaaatgtgtcagcaggaggaagtgaagcaggagatcaccgcaacattggaggctctgtgcggaatagccgaagccactcagattgacaatgtcgctatcctattcaattttctaatggatttcctgaccaattgcattggacttatggaagtgtacaaaaatacgccggagacggtgaatctgatcattgaagtgttcgtggaggtggcccataagcaaatctgctatctgggagagagtaaagcaatgaatctgtatgaggcttgcctgacactgctgcaggtctacagcaaaaataatcttggtcggcagcggatagatgttacagctgaagaggagcagtaccaagacctgttgctgattatggagttgttgaccaacctcctttcgaaagaatttattgacttttctgatactgacgaggtttttcgaggacacgagcccggacaagccgctaatcgcagtgtcagcgcagctgacgtggtgttgtacggcgtcaacctcatactcccgctcatgtag

SEQ ID NO: 30733 - DNA, 1008 bp, synthetic construct
  source 1..1008: mol_type = other DNA; note = Synthetic coding sequence
atggactttctgttagggaatccattctcctctccagtgggacaacgtatcgaaaaagccactgatggctccctgcagtccgaggactgggctttaaatatggagatctgcgacatcatcaacgagaccgaagagggacctaaggatgcactgcgcgctgtgaagaagagaatagtgggaaataagaattttcatgaggtgctggaaacgtgcgtgaagaattgtgggcaccgctttcatgtccttgtggcttctcaggacttcgtggagagcgtcctggtgaggacaattctgccgaaaaataatcctcccaccatcgtacacgacaaagtcttgaatttgatacagagctgggctgacgccttccgcagctctccggatttgaccggcgttgtaaccatatatgaggacctcaggagaaaaggactagagttcccaatgaccgaccttgacatgttgtctccgatacacacacctcagaggactgttttcaattcggaaactcagtctgggcaggacagtgtcggcacggatagctcccagcaagaggactcgggccaacatgccgcacctttacctgctcccccaatcctgagcggtgatactccaatcgccccaactcccgagcagattggcaaattaagaagtgaactggaaatggtgtctggaaatgtgagggtgatgtccgaaatgctcacggaactggtgcctactcaggcggaacctgccgacctggagctgctgcaggaactcaatcggacttgtagagctatgcagcaacgcgtccttgagctgattccccagattgccaatgagcaactgactgaggaactgctgattgttaatgacaacctcaacaacgtgttcctgcgccacgagcgtttcgaacgtttcaggacagggcagaccacaaaagctccttccgaggcagaacctgctgcagacttgatcgatatgggacccgatccggctgccaccggaaacctttcatcacagctggccggatag

SEQ ID NO: 30734 - DNA, 5192 bp, synthetic construct
  source 1..5192: mol_type = other DNA; note = Synthetic coding sequence
atgggcaattccgactcccagtacacccttcagggctcgaagaatcactcaaataccatcacaggcgcaaaacagatcccatgttctctgaagatcaggggaattcacgcaaaggaggaaaagtcccttcacggatggggacatgggagtaacggggctggctacaaaagcaggtcactggctcgctcatgcctgtctcacttcaaaagcaaccagccttacgccagtaggttgggagggccaacctgtaaagtaagccgcggagtcgcctatagtacccacagaacaaatgcccctggaaaagactttcaagggatctcagccgctttttcgacggagaatggctttcactctgtggggcatgagctagccgataatcatatcacatcacgcgattgcaatggccacctgctgaactgctacggccgaaatgagagtatagccagtactcctcctggcgaagaccgaaagtcacctagggtccttatcaagaccctgggaaagttggatgggtgtctaagagttgagttccacaacggcggtaacccctctaaggtgccagccgaagactgttccgagcccgtgcagcttttgcgctactcacccacacttgcatctgagacgagcccagtgcctgaggccaggcgtggcagctccgctgattcgctcccttcacatagacccagccccaccgattctcgcctgagaagtagcaaagggagctccttatcaagtgaatcctcctggtacgactccccatgggggaacgcaggagaactgtctgaggctgagggctcatttctagcacccggtatgcctgatcctagccttcatgcgtcttttcccccaggcgatgctaagaagccctttaaccagagttcatccctgtcctctctgagagagctttacaaagatgccaacctgggtagcctctccccatccgggatcaggctctcggacgagtacatgggcacccatgcatcccttagcaatagggtgtccttcgcctctgacattgatgtgcctagtcgtgttgctcatggggacccaatccaatactcgtcattcaccctgccatgtcggaagcctaaggccttcgtcgaagatacagctaaaaaagatagccttaaagcaaggatgagaagaatctcggactggaccggatctctctctcgcaagaaaagaaagctccaagaaccacgctcaaaagaaggtagcgattatttcgacagtcggtctgacggcctgaacacagatgtgcagggaagctctcaggcttcagcgttcctgtggtctggtggaagcacgcagatcctttcccagagatccgagtcgacacatgccatcgggagcgatcctctcagacagaacatctatgagaacttcatgcgagaattggagatgtcgcgcacgaatactgagaacattgagactagtaccgaaactgctgaaagttcatctgagagtctgagttcactcgagcagcttgacctactcttcgaaaaggagcagggagttgtgcgcaaggccggatggctcttttttaagccactggtgacggttcagaaagaacgcaaactggagcttgtggcgcgtagaaaatggaaacaatactgggtgaccctcaagggctgtactttactgttttacgagacttatggcaagaacagcatggatcaatccagcgctcccaggtgcgccttgttcgctgaagacagcatcgttcagtcggtgccagaacatccaaagaaggagaacgtcttctgcctgtctaacagttttggagatgtgtacttgtttcaagccacttctcagacggacctggaaaactgggtgacggcagttcacagcgcatgtgcgtctctgttcgccaaaaagcatgggaaggaggatactctgaggcttctaaagaatcagactaagaaccttctccaaaagatcgacatggatagcaaaatgaaaaagatggccgagctgcagcttagcgtggtgtctgatcccaagaatagaaaggcaatcgagaaccagatccaacagtgggaacagaacctcgaaaaatttcacatggatctgttccgcatgcgttgctacctggccagcctccaggggggagaactacctaatcctaagagcttactggccgctgcgtctcgccctagtaagttagcactcggcaggctgggtattctttccgtttcatcctttcatgctctggtctgttctcgggacgactcagctcttcgaaaaaggactttatcccttacccagcggggtcggaataagaaaggtatcttttcttcattgaaaggccttgacactctggcacgcaagggcaaggaaaaacgcccaagcatcacacaagtggatgagctccttcatatatatgggtcaaccgtggacggggtgccccgagacaatgcctgggagatacagacttacgtccattttcaggataaccacggcgttacagtgggtattaaacctgagcatcgggtcgaggacattcttacattagcctgtaagatgagacagttggagccctctcattacgggctccagctgaggaaacttgtggacgacaacgtggagtattgcattccggctccatatgagtacatgcagcaacaggtgtacgacgagatcgaagtctttcccctgaacgtgtacgacgtccagctaaccaagaccgggtcggtgtgcgacttcgggtttgctgtcactgcccaggtcgacgagagacaacatctgtctagaatatttatcagtgacgtcttgccagatggcctcgcctacggggaaggtctgcggaagggcaatgagattatgacactgaacggagaggctgtctccgatctggatcttaaacagatggaagccctgtttagcgagaaatcagtgggcttgacgctcatcgccaggccacctgatacaaaagcaaccctgtgcacttcttggagtgactccgacctcttcagtagagatcaaaagagccttttaccaccgcctaaccagagtcagcttctggaagaatttctagacaactttaagaaaaataccgcgaacgacttttctaatgtgcctgacattactaccgggctcaagagaagtcagacagacgggactttggatcaggtgtcccaccgggaaaagatggagcagacctttcgcagcgctgaacaaattactgccttgtgtcgatcttttaatgactctcaggccaacggcatggaggggccacgtgagaaccaagacccccctcctcgctcgctcgcaagacacctgtccgatgcggatcgtcttcgtaaggtaattcaggagttggtcgacactgagaagtcgtatgttaaagacctgagctgtttgtttgaactatacctcgaacctctgcagaatgagacgtttctcactcaagacgagatggagtccctttttggtagcctgcctgaaatgctcgagtttcagaaagtgtttctggaaacactggaagacgggatcagcgcaagctcagacttcaacacactcgagacaccttcccaatttaggaagctgctgttctccttgggaggaagctttctttactacgctgaccattttaagctctactctggcttctgcgcgaaccacattaaggtacagaaggtcctggagcgagcaaagactgacaaggctttcaaggctttcctagatgcaagaaaccccaccaagcagcattcctctaccctcgaaagctatttgattaaacctgtccaacgcgtcttaaagtatccactgttgctcaaagaactggtgtctctgactgaccaagagagcgaggagcattaccatttaacagaggccctgaaggctatggagaaggtggcgagtcacatcaatgagatgcagaagatttacgaagactacggcactgtattcgatcaactcgtcgcggagcagagcggcaccgaaaaggaacaacccgagtggagttccgaggtcatggacgtcttggatccacgtggcaaactgaccaagggtacactggaggagccacggacactagtcacggagctgtccatgggagaattgctgatgcattccaccgtgtcatggttgaatcccttcctgtcactgggtaaggctcggaaggatcttgagctcacggtcttcgtgtttaaaagagcagtcatcctggtctacaaggagaattgtaagctgaaaaaaaagctgccatctaattctagacctgctcataacagcacagacctcgatccctttaagtttagatggctcatcccaattagcgccttgcaggttcgcctgggtaaccccgcaggtacagaaaacaattccatttgggaactcatccacacaaagagtgagatcgaaggcaggcccgaaaccatctttcaactgtgttgtagcgattccgagagtaagactaacatcgtcaaggtgatccgcagcatcttaagagaaaatttccgcaggcatattaaatgcgagcttcctctcgagaaaacttgtaaagatcggctcgttccactcaaaaatcgagtgcccgtttcggcaaaattggcttcttcacggtcactcaaagtcctgaaaaacagcagttccaacgaatggaccggagaaaccgggaagggaacgctgttggacagcgacgagggatcattgtcctctgggacacagtcctccggctgtccgaccgcagagggtcgtcaggatagtaaatccacctctcccggaaagtacccccatccaggcctcgcagacttcgctgataatctgataaaagagtcggatatcctgagcgacgaggacgatgaccatcgacagacagtcaaacaaggatcgccaaccaaggatattgagatacagtttcagcgacttcgcatttccgaggatccagatgtgcatccagaagccgagcagcagccgggaccagaaagcggagagggacagaagggcggagaacagccaaaactcgtcaggggacatttttgccccatcaaacgaaaagcgaacagtaccaaaagggataggggcactttgctgaaagcccaaatacggcatcagtccctcgattctcagtccgagaatgccacaattgatcttaactccgtgttggagagggaattctcggtgcaaagcttgacaagcgtagtgtctgaagagtgtttctacgaaactgaatcccatggcaaatcata

SEQ ID NO: 30735 - DNA, 348 bp, synthetic construct
  source 1..348: mol_type = other DNA; note = Synthetic coding sequence
atggcgccagcgaaaaaggggggtgagaagaaaaagggtagaagcgccatcaacgaagtggtcacaagagaatacactattaacatccataagcgcattcacggggtgggttttaagaaaagggcgccaagagccctgaaggaaattcgtaaattcgccatgaaggagatgggcacccctgacgttcggatagacaccaggctgaacaaagcggtgtgggctaaagggattcggaatgtgccgtaccggattcgggtgaggctgagcagaaagcgaaacgaggatgaggattctcccaacaaactttatacgcttgtgacttatgttcctgtgactactttcaagtag

SEQ ID NO: 30736 - DNA, 747 bp, synthetic construct
  source 1..747: mol_type = other DNA; note = Synthetic coding sequence
atggctctagaagttggggatatggaggacggccaactcagtgattctgactctgacatgacagtagccccttccgatcggccacttcagctgcctaaggtcctcgggggagatagcgccatgagagctttccagaatacagctaccgcttgcgccccagtgagtcactaccgggctgttgagtccgtcgactcatccgaagaatccttttctgacagcgacgatgactcttgcctctggaaaaggaaacgtcagaaatgtttcaacccacctccaaagcccgaacccttccagtttgggcaaagctcgcagaagccaccggtagccggaggcaagaaaattaataatatttggggcgcagtcttacagaaattgaggaaggagtctcaggaacatacgaaggatctggacaaagagcttgatgagtacatgcacggaggtaaaaaaatgggcagcaaagaggaggagaatggacagggccacttaaagcgcaagcggcctgtcaaggatagactcggaaacagacccgagatgaattacaaggggaggtatgagatcacagcagaagacagccaggagaaggtcgctgacgaaatcagctttcgcttgcaagagcctaagaaagatctcatagccagggtggtgagaaacaagctgaggaccttcagcactttgaagaccaagcgaaatatgaagattaaaaagctgctggggaggggtgagcacaaatgctgggggaagaggtag

SEQ ID NO: 30737 - DNA, 78 bp, synthetic construct
  source 1..78: mol_type = other DNA; note = Synthetic coding sequence
atggcaatggccccaagcccctctctagtccaggtctacactagtcccgcagccgtggccgtctgggagtggcaatag

SEQ ID NO: 30738 - DNA, 171 bp, synthetic construct
  source 1..171: mol_type = other DNA; note = Synthetic coding sequence
atgtcttattaccagcgccctttttccccatctgcttacagtctaccggcttcactcaatagctccatcgtaatgcagcatggcacgagcctcgatagcacagacacatacccacagcacgcacaatcccttgacggcaccacaagttcctccatacccctgtatcggtag

SEQ ID NO: 30739 - DNA, 450 bp, synthetic construct
  source 1..450: mol_type = other DNA; note = Synthetic coding sequence
gtgagagagttggaggccgaactggatgcggaacagaagaagcacgcagaggccttaaagggagtgagaaagcacgagaggagagttaaggagctcgcctaccaagcagaagaagatcgaaagaatctggccaggatgcaggacctggtcgacaagttacagagcaaagtgaagtcatataaacggcagttcgaagaggccgaacagcaggcgaacacaaacctcgcaaaatacagaaaagcacagcacgagctggatgatgccgaagagagagccgacatggctgagacacaggccaataagctcagagcacgaaccagagatgccctgggtcctaaggtgcggtccggcaggggtatagccctttgcgccggagggctgtggggtctcacgggttcaaccgctcatagcgcgataccattttcatcagcccaaggcgtgacggcttag

SEQ ID NO: 30740 - DNA, 468 bp, synthetic construct
  source 1..468: mol_type = other DNA; note = Synthetic coding sequence
agcaatgtaatggaggctaatgcagcccgtcaggcgacacccgcagaatggtcccaggatgattcgaacgatatgtgggaagatcaagaggaggaagaggaagaggaggaggacggtctcgcgggtcagctcctgagcgatatcctagcaacatcaaagtatgaagaggattattacgaagatgacgaggaagatgatcctgacgccctgaaggaccccctgtaccagatcgacttgcaggccactctgatgactatgaggggggagttttaccgcccttccgcctctaagaagggttcactttcaactttcgcaccatccggcccagctgccaaccatttcgccgcattgaccggcctcgagatgcacttcctcctcaatttaaagtggcatctggatccctggcccctggcctcggccgtcactttgatgaccattcagacgaggctgacaggcgctgtaacttag

SEQ ID NO: 30741 - DNA, 1620 bp, synthetic construct
  source 1..1620: mol_type = other DNA; note = Synthetic coding sequence
atggccacatcagctcctctacggtccctggaagaagaggtgacatgctctatttgtctagattaccttagggaccctgtcaccatcgattgtggccatgtgttttgccgtagttgcactactgatgttagaccaatctcgggctccagacctgtctgcccgctgtgtaaaaaacctttcaaaaaagagaatatacggccagtctggcagttggcttcccttgttgaaaatatcgagcgcctcaaggtcgataaaggccgacagcccggtgaggtgaccagggagcaacaggacgcaaaactttgcgagagacaccgcgagaagctgcattactattgcgaggacgacggtaagctgctgtgcgtaatgtgccgagagagtcgtgaacaccgcccacatactgctgtgttaatggaaaaagctgctcaacctcaccgtgagaaaatcctcaatcatctttctaccctgagacgcgatcgtgacaagattcaagggttccaagccaagggcgaagccgatatactggccgctctgaagaaattacaggatcagaggcagtacatcgtagcagagtttgagcagggtcaccagttcctcagagagcgcgaagagcatttgctggagcagctggctaagcttgaacaggaacttaccgaaggtcgcgagaagtttaagtcccggggagtgggggaactggcaagactggccctcgtgatctcagagctcgagggaaaggctcagcagcccgcagctgaactgatgcaggataccagggacttcctcaaccggtatcccagaaagaaattttgggtgggaaagcccatcgctagagtcgttaagaagaagactggtgaattctctgacaaattgctatccctgcagagaggtctgagggaatttcaaggcaagctgctcagggacctggaatacaagactgtgagcgtaactctagacccacagagtgcatccgggtacctgcaactgagtgaagattggaaatgcgtgacctacacatccctgtataaaagtgcgtacttacacccgcagcagtttgattgtgaacctggggttctggggtcaaaaggatttacctggggtaaggtgtactgggaagtcgaggttgagagggaagggtggagtgaggatgaagaagagggcgacgaagaggaagaaggcgaggaggaagaggaggaggaggaagctggctatggggacgggtatgatgactgggaaacagacgaggacgaggaatccctgggagacgaagaggaggaggaggaggaggaggaagaagaggtgctagaatcttgtatggtcggagtcgcgagagacagtgtgaaacggaagggcgatctttccctgagacctgaagatggcgtgtgggctcttaggttatcttccagcgggatttgggcaaacacatctccggaggctgagctgtttccagccctccgcccacgcagagtgggaattgctctagattacgagggcggtaccgtgaccttcacaaacgcagaaagccaagagctgatttataccttcactgccacattcacgaggcgcctggtcccattcctctggttgaagtggcccggtactcgactactcctccgaccatag

SEQ ID NO: 30742 - DNA, 645 bp, synthetic construct
  source 1..645: mol_type = other DNA; note = Synthetic coding sequence
atgccttcaccatgggggtggttcgccgttaccgcctgtggagcccagagaaataactttgaagagcccgtggcccttcaggagatggacacctcaaacggtgtactcctgcccttctacgatccggactcttctatcgtgtacctttgcggcaagggtgatagtagtatcagatactttgagatcacagatgaaccacctttcgtccactatctcaataccttcagttctaaggagcctcagaggggcatgggctttatgccaaagcgagggctggatgtttctaaatgtgaaatcgctagattttataaactgcatgaaaggaagtgcgagcctatcatcatgaccgttcccagaaagtcggacttgtttcaggacgccgaaccggtgctcataagtctgcgtgatggctatgtcccacccaagcatagggaactgagagtgacaaaaagaaacatccttgacgttaggccgccatctgggccaagacggtcgcaatcagcatccgacgctccactgtctcagcacaccctcgagacgctgctggaggagattaaagctttacgtgagcgggtgcaggcacaggagcagagaataacagccttagaaaatatgctctgtgaactcgtggatggaacagattag

SEQ ID NO: 30743 - DNA, 690 bp, synthetic construct
  source 1..690: mol_type = other DNA; note = Synthetic coding sequence
atgttgcagttaagggatagtgttgactccgcaggcactagcccaaccgccgttctggcagccggagaggagcccggatccattgaacaggccgtggaagagatccgtgtggtggtgaggcccgtagaagacggagagatccaaggtgtgtggctcctgaccgaagtggatcactggaataacgagaaagagagactggtattggtcactgagcaatctttgttaatatgcaagtacgattttatcagcctccaatgccagcaggtggtcaggatcgcactgaacgcagtggacactatctcctatggagagtttcagtttccccctaagtcccttaataagcgcgagggctttggcatccgtatccagtgggataagcagtctaggccttcttttatcaacagatggaatccctggtccacaaacgtgccctacgctaccttcacggagcatcctatggcaggggctgacgagaagaccgccagcctgtgccagttagaatccttcaaggcccttctcattcaggccgtcaagaaggcccagaaagaaagtcctctgcctggacaggccaacggcgttctcatcctggaacgacctttgttaatcgaaacatatgtggggcttatgtctttcatcaataatgaggcgaagttaggctatagcatgactagaggcaagataggtttttag

SEQ ID NO: 30744 - DNA, 390 bp, synthetic construct
  source 1..390: mol_type = other DNA; note = Synthetic coding sequence
atgtgcgaggtgtctagaggttggaagccttgcactgagggaattttgaaagtacgcccaactcgtaagatctcctacgagggcaacataacgccaacagttgaactcaatgccctgtgtatgaaattaggaaaaaagccaatgtataagcctgtggatccatatagccgcatgcagtccacttacaactacaacatgcgaggcggagcctatcctccgagatacttttaccccttccccgtgccccctctactgtatcaggtggaactctcggtgggcggtcagcagtttaatgggaagggcaaaactcgtcaggctgcaaaacatgacgctgctgcaaaggccctgagaatcctacaaaatgagccgcttcctgaacgcctggagtag

SEQ ID NO: 30745 - DNA, 3042 bp, synthetic construct
  source 1..3042: mol_type = other DNA; note = Synthetic coding sequence
atggatctgttcagaatgcgctgctacctggccagcttacaagggggagaactgcctaatcccaagtctctgctggccgctgcctctcgaccttcaaaacttgctctaggtcgcctcggaatcctcagcgtgtcatctttccacgcattggtgtgctctagggatgattctgcattgcggaaacgtactctgtccctcactcaaagaggaagaaacaaaaagggaatcttctcttctttgaagggactggatacactggcccgtaaagggaaagagaaaagacccagtatcacacaagttgacgaactgctccacatttacggaagtactgttgatggggtacccagagataatgcttgggagatacagacctatgtccactttcaggacaatcacggtgttacagttggaatcaagcctgaacatagggtggaggatatcctgaccctggcctgtaagatgaggcagctggaacctagccactacggattgcaactccgaaagctggttgacgataatgtagaatactgtattccagctccttacgagtacatgcagcagcaggtatatgatgagatcgaagtgttcccgctcaatgtatacgatgtccaacttaccaaaactggctcagtgtgtgactttggtttcgctgtgactgcccaggtcgatgagcgtcaacacttatctaggattttcatctcagatgtcctgccagacgggttggcctacggagaaggactgaggaagggcaacgagatcatgacactcaacggcgaggcagtctctgatctggatctgaagcagatggaggccctgttcagcgagaaatctgtgggtctaactctcattgccagacccccagacaccaaggctacattatgtacgagctggtctgattctgacctgttttcccgggatcagaagtccttactgccaccaccaaatcagtcccaattgctagaagagttcctcgataactttaaaaagaatacagctaatgacttttctaatgtgccagacatcactaccgggttgaaacgctctcaaacagatggcactctcgaccaggtgtcccatagagagaaaatggagcaaacattcaggagcgccgagcaaataaccgccctgtgtcgatcattcaacgactcacaggccaatggcatggagggcccacgtgaaaatcaggacccgccacctcgctccctggccaggcacctgtcagacgccgatcggttaagaaaggtcatccaggagctggtggacactgagaaaagttacgtgaaggacttaagctgcctgtttgagctgtaccttgagcccctgcagaatgaaacttttctgacgcaagacgaaatggaatctttgtttggatctctacccgaaatgttagagttccagaaagtcttcctggaaaccttagaggatggaatctcagcgagcagtgacttcaatacccttgaaacaccttctcagtttcgaaaactgttgttcagcctgggcggttcatttctgtactacgccgaccacttcaaactatattcggggttctgcgccaaccatatcaaggtccagaaggtgctggaaagggcaaagaccgacaaagcattcaaagccttcctggatgcccgtaatcccacgaaacaacacagcagtaccctggagagttatctgataaaacctgttcagagggtactcaagtacccccttttgttgaaggaactggtgtccctaacagaccaggaatccgaagagcactatcacctcacggaagcactgaaggctatggagaaagttgcctcccatattaacgaaatgcagaagatctatgaggattacggaactgtgttcgatcagttagtggctgagcaaagcggaaccgaaaaagaggttactgagctctctatgggagaattgctcatgcactctaccgtgtcttggctgaatccttttctctcactaggtaaagcacgaaaggatttggagcttacagtttttgttttcaaacgggctgtgatcctagtttataaggagaactgtaagctcaagaaaaaactccctagtaattctcgacccgctcacaattcaactgacctagacccttttaaatttaggtggctgataccgatatccgctctgcaagttaggctagggaacccggcaggcactgagaataatagcatctgggaactcatccacactaagtccgaaattgaaggcagaccagaaacaatttttcaactgtgctgttccgacagcgagagtaaaacaaatattgtcaaagtcattcgatcaattctccgagagaattttcgcaggcatatcaagtgcgaacttcccctggagaagacgtgtaaagataggctggtgcccctgaagaaccgcgtgcccgtcagtgcaaaattagctagttctagatccctaaaggtcctgaaaaactccagcagtaatgagtggacgggagagaccggcaagggtactctattagacagcgatgaaggaagccttagctccgggacgcagtcatccgggtgccccactgcagagggtagacaagattcaaagagcacctcccctggaaagtatccacacccgggtctagccgacttcgccgacaatttgatcaaggaaagcgacattctgtcagatgaggatgatgaccatcgccagactgttaagcaaggaagtcccacgaaggatattgagatacagttccagaggcttcgcatttccgaagatcccgacgtccacccggaggcagaacaacagcccggacctgagtctggcgaggggcagaaaggtggggaacagccaaagttggtgagaggacacttctgtccaataaagagaaaggctaactcgactaaacgtgatcgaggaactctgctgaaggcccaaattaggcaccagtctctcgactctcaatccgagaatgctacaattgacttgaacagcgttcttgaacgggagttctccgtccaatccttaactagcgttgtctctgaggagtgcttctacgaaactgagagccatggaaagagctag

SEQ ID NO: 30746 - DNA, 1149 bp, synthetic construct
  source 1..1149: mol_type = other DNA; note = Synthetic coding sequence
atggccgcaaacctctctcggaacgggccagccttgcaggaggcttatgtacgggtagtgaccgaaaagtctccaaccgattgggctttattcacttatgagggtaattccaatgacatacgcgtcgccggaacgggcgaagggggtctggaggagatggtggaggaactcaacagcggtaaggtgatgtacgcattttgcagagtgaaggatcccaactctgggctgcccaaattcgtgcttattaactggacaggtgagggagtcaatgacgtgaggaagggcgcatgcgcttctcacgtctcaacaatggcctcctttttgaaaggatctgtgtaccagaaaaccaacgcagtttctgagataaaaagagtaggaaaggatagtttttgggctaaggcagaaaaagaggaggaaaacaggcgtctcgaagagaagcggagggcggaagaagctcagcgccagcttgagcaggagagaagggaacgggagttacgagaggctgcacgtagggaacagcggtaccaggagcaggggggagaggcatccccccagtctcggacttgggaacagcagcaggaggtagtttcaaggaaccgcaatgagcaagagagcgccgtgcatccgagagaaatcttcaagcagaaggagcgggctatgagcacaacatctatctcaagcccacagccaggcaaactccgctccccattcctgcagaaacagctcacgcagccggagacgcacttcggcagggagccagctgccgctatctccaggcctagggccgatcttcccgctgaggaaccagccccatccactccaccttgccttgtccaagccgaagaggaagcagtgtacgaggaacctccagaacaagagaccttctatgaacagccgccactggtccagcaacagggggctgggagtgagcacatcgatcatcatattcagggccagggactgtctggccagggattgtgcgccagagccctgtacgactaccaagccgcagatgacactgagataagcttcgaccccgagaacctaataacgggaattgaggtgatcgatgaagggtggtggcgtggttacgggcctgatgggcatttcggcatgtttccagccaactatgtcgaacttatcgagtag

SEQ ID NO: 30747 - DNA, 660 bp, synthetic construct
  source 1..660: mol_type = other DNA; note = Synthetic coding sequence
atggtggtgctgtcagtgcctgccgaggtaacagtaatactgctcgatattgaagggaccacaactcccatcgccttcgtgaaagacatcctgtttccttatattgaagagaatgtgaaggagtatcttcagacccactgggaagaagaggagtgccagcaggacgtttcgctcctcagaaaacaggccgaggaagacgcccatctcgatggcgcagtcccaatcccagcagcttccggtaacggagttgacgatctgcaacaaatgatccaggccgtagttgacaacgtgtgttggcagatgtccctggacagaaaaaccacagccctgaagcagctgcagggtcacatgtggagagctgcctttactgcaggccgaatgaaggcagagttcttcgccgatgttgtccctgccgtgcgtaagtggagggaagcgggaatgaaagtatatatctacagttctggaagcgtcgaagcgcagaagttgctgttcggacactctactgaaggcgatatacttgaactggtagatggacatttcgataccaagattgggcacaaagtggagtcagaaagctacaaagactgtcggcagcattgggttctcaaccaacagcacttcgtcagtgacagatgttatagcagagggcagtgttgctag

SEQ ID NO: 30748 - DNA, 1446 bp, synthetic construct
  source 1..1446: mol_type = other DNA; note = Synthetic coding sequence
atggcctctgctgcaagcgtgacatcgttagcagacgaagttaattgtccaatctgccaggggacactgagagagcccgtgacgatcgactgtggccataacttctgtagagcctgccttactcgctactgcgagatacctgggccagatcttgaggaatcaccaacctgtcccttgtgcaaagaaccattccgcccaggtagcttcagaccaaattggcagcttgctaacgtcgtagagaatattgaacgactgcaattggtgagcacgctggggctgggggaggaagacgtctgccaggaacacggtgaaaagatttacttcttttgtgaggacgacgaaatgcagctttgcgtcgtgtgcagagaggcgggagagcacgctacacatacaatgcggtttttagaagacgccgctgccccataccgggaacaaatccacaagtgcctaaagtgcctgagaaaggagcgggaggagatccaggagattcaatcaagagagaataaacgaatgcaggtgctgcttacacaggtctctacaaagcgccagcaagtaatatccgagtttgctcatctgagaaaatttcttgaagagcagcagtctatcctgttggctcagttggagagccaagatggcgatattctgaggcagcgagatgaatttgacttactcgtggccggtgaaatctgtcgcttcagcgcactcatcgaagagctcgaagagaaaaatgagaggcccgcaagggagctgctgactgatattcgcagcaccctcatacggtgcgaaacacgtaaatgtcggaagcctgtggcagtgagcccagagctgggtcagaggatcagagatttccctcagcaagcactgccgctgcaaagagaaatgaagatgttcttggaaaagctatgttttgagctggattacgagcccgctcacatctcactcgacccccagacaagccatcctaagctgttattatcagaggaccatcagcgggctcaattcagctacaaatggcaaaattcccccgacaacccccagcgttttgatagagccacctgtgtgttggcccataccggcattacagggggacgacacacctgggtggtatctatcgatctggcccatggcggttcctgtaccgtcggggtggtttcagaagacgtgcaaaggaaaggggagctccggctcaggccagaagagggagtttgggccgtaaggctggcgtggggcttcgtctccgcgttgggctcattcccaacgaggctgaccctgaaggagcagccgaggcaagtcagggtgtctctcgactatgaggtgggatgggttactttcaccaatgctgtgacccgcgagccgatctatacattcacggcctccttcaccaggaaggtgataccatttttcggtctttggggcaggggatcctccttctccttgtcgagctag

SEQ ID NO: 30749 - DNA, 1644 bp, synthetic construct
  source 1..1644: mol_type = other DNA; note = Synthetic coding sequence
atggccggtacaaaaaataaaacccgggctcaggcaaagacagaaaaaaaggctgccatccaggcgaaggcaggcgcagagcgagaagccactggcgtagtaaggccggtcgctaagactcgcgctaaggccaaagctaagactgggagtaaaaccgatgccgtcgccgaaatgaaggccgtctctaagaataaggtggtggcagagaccaaagaaggcgcactgtcagagccaaagactctgggtaaggccatgggcgattttactcccaaagccggtaacgaatcaacttcctccacatgtaaaaatgaagccggaacagatgcatggttttgggctggcgaggaagccactattaatagttggttctggaatggggaagaggcgggtaattctttctctacaaaaaatgacaaaccggaaatcggcgcacaggtctgtgccgaggagctcgagccggctgccggagcagactgcaaaccacgttccggcgctgaagaggaagaagaagagaacgtcattggaaattggttttgggagggagacgacacgtcgttcgatcccaacccaaaaccagtctcaaggattgtgaaaccccaacctgtctatgagatcaacgagaaaaacagacctaaagactggagtgaagtgaccatttggcctaacgccccagcggtgacccctgccgtcctggggttccgctcgcaggcaccgtccgaagcttctcccccatcttacattgtgctcgccagtgcagaagagaacgcgtgtagtctgcccgttgccactgcatgccgtccttctagaaataccagatcttgttctcagcctatccctgagtgccggttcgacagtgatccgtgcatacaaacaatcgatgagattcgtcgacagattcgcataagggaagtcaacggaatcaaacccttcgcatgtccctgtaagatggagtgttacatggactctgaggagtttgagaagttggtgtcacttctcaagtccactactgatccactgatacacaaaatcgcaaggatcgccatgggcgtccataatgtccaccctttcgcacaggaatttatcaacgaggtaggcgtggtgaccttaattgagtcacttctatctttcccaagcccggagatgcggaaaaaaaccgtgattactcttaaccccccatctggcgatgaacggcagagaaagatcgagctacatgtgaaacacatgtgcaaagagaccatgagcttcccattgaactcacccggtcaacaatcaggactgaaaatcctaggtcagttaaccaccgactttgtccaccactatatcgtggccaattattttagtgagttgtttcacctcttgagcagcggcaactgcaaaacgcgtaatttggtcctgaaactgttactcaatatgtctgagaatcctacggccgctcgcgatatgattaatatgaaggcactggccgctctaaaacttatctttaaccagaaggaagccaaggctaaccttgtctctggcgtcgctatctttattaacatcaaagagcacatccgcaagggttccatcgttgtcgtcgaccatctctcatacaataccctcatggctatctttcgggaggtgaaagagattatcgagacaatgtag

SEQ ID NO: 30750 - DNA, 1887 bp, synthetic construct
  source 1..1887: mol_type = other DNA; note = Synthetic coding sequence
atgagcgataagagtgacctaaaagctgaattggagagaaagaaacagaggttggcacagataagagaggaaaaaaagcggaaagaagaggaacgtaagaaaaaagaagccgacatgcagcaaaaaaaggagccagtgcaggacgatagtgacctggatcgaaaaaggagggaaacagaagcactgttacagagcatcggtatcagccccgagccccctctggtccctactccaatgagcccaagctccaaatctgtgagtacacccagcgaagctggctcacaggatagtggcgatctgggccctctcactcgcacacttcaatgggacaccgatccttccgtgctgcaactgcagtctgattccgagctcggcagacggctccacaagctgggggtctcaaaggtgacgcaagttgattttctcccgcgtgaagtcgtaagttactcaaaagaaacgcagacacctctggctacccatcagtccgaggaagatgaggaggacgaggaaatggttgagtcaaaagttgggcaggactctgagttggagaatcaggataagaagcaggaggtgaaggaggcccctccacgcgaattgaccgaggaggaaaagcagcagattctacatagtgaagagtttctgatattctttgatcgtacgatacgggtgattgagagagccctcgccgaggacagcgacatatttttcgactatagtgggagggaactggaggaaaaggatggggacgtacaggcaggcgctaatttgagtttcaacagacagttttacgacgaacactggtccaaacatcgtgtcgtgacgtgcatggattggtccctgcagtatccagagctgatggtggcctcttacaacaataatgaggatgctcctcacgagcccgacggcgtcgcccttgtgtggaacatgaagtttaaaaagacaactccagaatacgtgtttcattgtcaaagtagtgtgatgtctgtttgttttgcgagattccaccccaacctcgtggtaggcggtacgtacagcggccagattgtgttatgggataatagatcacatagaagaaccccagtccaaagaacaccactgagcgctgctgctcatactcaccccgtatattgcgtaaacgtggtgggaacccagaacgcccacaacttgattacggtgtcaactgatggcaaaatgtgcagctggtctctcgacatgttgagtacaccccaggaaagtatggagcttgtgtacaacaagagcaagcccgtagctgtcactggcatggctttccccaccggagacgtgaacaacttcgttgtggggtccgaggagggcaccgtgtacactgcttgtcgtcacggcagtaaagcagggattggggaagtgttcgaggggcatcagggcccagtaaccggaataaattgccacatggctgtgggaccaattgatttctcacacttatttgttacatcttcttttgactggactgtgaaactttggactaccaaacacaataagccgttgtactctttcgaagataacgccgactacgtttatgatgtgatgtggtcacctgtgcacccggctttgttcgcctgcgtggatggcatggggcgtctcgatctttggaacctgaacaacgacactgaggtgccaacggcatctgttgcaatcgagggagcttccgcgcttaaccgcgtcagatgggctcaagccggaaaggaggttgcagtgggtgattctgagggaagaatttgggtgtatgacgtgggcgagcttgcagtaccccataatgacgagtggacacgtttcgcacgaaccctggtcgagattagggctaaccgcgcagacagcgaagaggaaggaaccgtcgagctgtctgcttag

SEQ ID NO: 30751 - DNA, 474 bp, synthetic construct
  source 1..474: mol_type = other DNA; note = Synthetic coding sequence
atgaggagtggatttcgctgcgatgaacccgctgaggcagtggcgcctgagaggcagactgtgtcgggggctgtcgccctggccagttttacctccccacacacccacccagtcgacgacggcggaagacactacagctggggatccccaaaaagaatcctcggtcttggcccaggtgacgccgctaaggaggctggcctcgtgaggcccctccagggccagagcgaaaaaattctgctgcgtacgcgaaacagacagccaatggagccacctatggaaccaagcgggggagaacaggaacctggcgctgttaggtttctggaccttccttgggaggatgtcttgttgccacacgtgctcaaccgggttccactgaggcagcttctccgtctgcagcgcgtcagtagggcattccgcagtctggtacaactgcatctggctggactccggcgttttgatgcagcccaggtgtag

SEQ ID NO: 30752 - DNA, 483 bp, synthetic construct
  source 1..483: mol_type = other DNA; note = Synthetic coding sequence
atggaagccgaaagaccccaggaggaagaggacggagagcaggggcctcctcaggacgaggaagggtggccaccacccaactcaacaacaagaccttggcggagcgcaccaccctcacctcccccacctgggacaaggcacactgccctgggacccagatccgctagcctgctgtcgctgcagacggagctactcctggacctggtcgccgaggcacagtcccggaggcttgaggagcagagggctactttttatacaccgcagaacccatcgagtcttgccccagcaccattgcgtcccctggaggaccgcgaacagctctacagtacaatcctatcccatcagtgccagcggatggaggcacagcggtccgagccccctctgcccccaggtggccaggaactattggaattgcttctaagggtacaggggggaggcaggatggaggagcaacggtcacgccctccaactcacacctgttag

SEQ ID NO: 30753 - DNA, 402 bp, synthetic construct
  source 1..402: mol_type = other DNA; note = Synthetic coding sequence
atggcagccttacgaccattagtgaagcccaagatcgtgaagaaaaggaccaagaagttcatacgccaccaatcagatcgatatgttaagattaagcggaactggcgcaagccccgtggcatcgacaaccgtgttcggagacggtttaaaggacaaatccttatgcccaatatagggtacggtagcaacaagaagacaaagcatatgttgccatctggattccgtaaattcctcgtccataacgtgaaagaattagaggtactgcttatgtgcaacaaaagctattgtgcagagattgctcataatgtgtcgtccaagaatcgtaaagctatagtggaacgagccgctcagctggccatccgtgtgaccaacccaaacgcacgtctccgcagtgaagagtag

SEQ ID NO: 30754 - DNA, 639 bp, synthetic construct
  source 1..639: mol_type = other DNA; note = Synthetic coding sequence
atggacctgttcggtgacttacctgagcctgagagatctcccaggcctgcagccggtaaggaggcccaaaaaggacctctgctgttcgatgatctaccacctgccagtagcactgatagcggcagtggcggaccactgctctttgatgacctgccccctgctagctcgggggactcaggcagcctggcaacatccatttctcaaatggttaaaacggaggggaagggcgctaagcggaagacctcggaagaggaaaagaacggcagcgaagagttagtagagaagaaggtgtcatcaagcgtgatcttcgggctgaaggggtacgtcgcagagcggaagggagaacgcgaggagatgcaggacgcccatgtgattctgaacgacattaccgaggagtgtcgaccaccgagttcgcttataactcgggtgtcgtacttcgctgttttcgatgggcacggcggaattagggcatcaaagtttgcggcacagaaccttcaccagaaccttatcagaaagttcccaaagggagacgtgatctcagtagagaagactgtcaagagatgtctgttggatacttttaaacatacggacgaggagtttttgaaacaggccagctctcaaaagccagcttggaagtag

SEQ ID NO: 30755 - DNA, 1131 bp, synthetic construct
  source 1..1131: mol_type = other DNA; note = Synthetic coding sequence
atgccgttgcaagtctctgactatagctggcagcagaccaaaaccgccgtgttcctgagcttacccttaaagggcgtctgcgtgcgagacacagatgtgttctgcactgagaactacctgaaagttaattttccaccgtttttgttcgaagcttttctgtacgctcctatcgatgatgagagcagcaaagctaaaatcgggaacgatacgatcgtgttcactctctataaaaaagaagccgcaatgtgggaaactctgtccgtgacgggagtggataaagaaatgatgcaacggatcagagaaaagtccatcctgcaggcccaggagcgggctaaggaggcaacagaggccaaggcagctgcgaagcgagaagaccaaaaatatgccctctccgtgatgatgaagatcgaggaagaagaaagaaagaaaattgaagatatgaaggagaacgagagaattaaagcgacaaaggcactcgaggcctggaaagagtaccagcggaaggccgaggaacagaaaaaaatccaacgtgaggagaagctctgccagaaggagaagcagatcaaggaggagaggaaaaagattaagtataaaagtctgacaagaaatctggccagccggaacctggccccaaaagggcgtaattctgaaaatatctttacagaaaaactgaaagaggattccatcccagcccctcgcagcgtcggatcaattaaaataaacttcacccccagggtcttcccaactgctttaagagagagtcaggtagctgaagaggaggagtggctgcataaacaggctgaagcgaggcgggctatgaatacagatatagccgagctgtgcgacttgaaggaagaggagaagaatcccgaatggttgaaggacaaggggaacaaacttttcgcaacagagaattacctcgccgctattaatgcctataacctggccatcaggctgaacaataagatgccacttctgtatctcaatagggccgcatgtcatctcaaactaaagaatttacataaagctatagaggacagcagcaaggcatatcgcatcatgaagaggcatttaagattgatccaccccactaagctttataagttaatgctgcgcagattcggaatgtag

SEQ ID NO: 30756 - DNA, 1485 bp, synthetic construct
  source 1..1485: mol_type = other DNA; note = Synthetic coding sequence
atggccgctgcagcggaatgtgacgtcgtgatggccgctacagaacccgagttgctcgatgatcaagaggcgaagcgagaagccgaaacgtttaaggagcaagggaatgcatactacgccaaaaaggactacaatgaggcgtataattattataccaaggcaatagacatgtgccccaagaatgccagttactacggcaatcgggctgcaactcttatgatgttgggaaggtttcgagaagcactgggcgacgctcaacaatctgtccgcctggacgactcattcgtcaggggacacctccgagaaggaaaatgtcatttgagtctcggcaacgctatggctgcctgccggagctttcagagagccttggagttggaccataagaacgcccaagcccagcaggagttcaagaatgctaacgccgtgatggagtacgagaagatagcagagaccgattttgaaaaaagggatttccggaaggtggtgttctgcatggaccgagcccttgaattcgcgccagcctgccaccgcttcaagattctgaaggccgaatgcctggcgatgctgggccgatatcctgaggcccagagtgtcgccagtgatatactccggatggacagtacaaacgccgatgctctctacgtgcggggactgtgtctgtattacgaggattgtatcgaaaaggcagtgcagttctttgtgcaggctctccgtatggcacctgaccatgagaaggcgtgcatcgcatgccgaaacgcaaaggcattaaaggcaaaaaaagaagatggcaacaaagccttcaaggaggggaattacaaactcgcttacgagctttatactgaggccctcggcatcgatccgaataatattaagacaaacgctaagttatactgtaaccgaggcactgttaattccaaactgaggaaactcgatgacgcgattgaagattgcaccaacgccgtgaagctggatgacacgtacattaaagcctacttgaggagggctcagtgttatatggacacagagcagtatgaagaggcggtgagggattacgaaaaggtgtatcagactgaaaagactaaggagcataagcagttgctaaaaaatgcacagctcgaactgaagaaaagcaagcggaaagactattataagattctgggcgtcgacaaaaacgcttcggaggatgaaattaagaaagcatacagaaaaagggcactgatgcatcatcctgaccgacattcaggggctagcgccgaagtccagaaggaggaggagaagaaatttaaagaggtgggagaagcttttaccatcctttcggaccctaagaagaaaacacggtacgacagcggccaagatctcgacgaagaaggaatgaacatgggcgatttcgatcccaataatatcttcaaggcattctttggcggtccaggtgggttcagctttgaagcatctggccctggcaacttcttcttccagtttgggtag

SEQ ID NO: 30757 - DNA, 1329 bp, synthetic construct
  source 1..1329: mol_type = other DNA; note = Synthetic coding sequence
aacgaggtgtataacctcacccaggagttcttccggcacgacaaacccgtcaatgcagaatcacagaattcagtcggagtatttactcgggaggaagtgcgtaatcggattcggaacgaccctgatgaccctgaagcaactaagaggctcaaactggccatgatccagcagtacctgaaggtagagagttgtgagtcaagtagtcatagcatggacgaggttagtctgtccgcatttggcgagtggaccgagattcctggtgctcatcatattattccatcaggatttatgagggtggtggagctattggccgagggcatcccggcacatgtgatacagctcggtaagcccgtgaggtgtattcactgggaccaggcgagtgctagacccagaggcccagagatcgaacctcggggtgaaggcgatcacaaccatgacacgggtgaaggtgggcagggtggcgaagagccacgcggtgggcgttgggatgaagacgagcagtggagtgtggttgtggagtgcgaggattgcgagctgatcccggctgatcacgtcatagtcactgtgagcctgggagtcctgaagcgccaatatactagctttttccgacccggtctgcccacagagaaggttgcagccatccatcgcctgggaattggcaccaccgataagatttttctggagttcgaggagccattttgggggcctgaatgtaactccctgcaatttgtgtgggaggatgaagccgagtcccacacactgacgtaccctcctgagctgtggtaccgcaagatctgcggtttcgacgtcctgtatccccctgaacggtacggccacgttctgtccgggtggatttgcggtgaagaggcattagtaatggagaaatgtgatgatgaggccgtagctgagatatgtacagagatgttacgtcagtttactggcaaccctaatattcccaaaccccgacgaattctgagatcagcgtggggcagcaacccttatttccgcggaagctatagttacactcaggtgggttcctcaggagctgacgtcgaaaaactcgcaaagcctctgccgtacacagaatcatccaagaccgcccatggtagcagtactaagcaacaacccggacacctattttcatctaagtgtcctgaacaaccccttgacgcaaacaggggcgcagtgaagcccatgcaggttcttttcagtggggaagcaactcataggaagtactactcaacgactcacggagctctgctaagtggccaacgggaagccgcacgcctgattgagatgtatcgagacctctttcagcaggggacatag

SEQ ID NO: 30758 - DNA, 180 bp, synthetic construct
  source 1..180: mol_type = other DNA; note = Synthetic coding sequence
atgtcttattaccagcgcccattctctcccagtgcttactccctgcctgcttcgctgaactcttccattgtgatgcagcacggaacctccttggatagcactgatacttacccccaacatgctcagagccttgatggtacgaccagctccagtatcccactctatcggagctccgaatag

SEQ ID NO: 30759 - DNA, 837 bp, synthetic construct
  source 1..837: mol_type = other DNA; note = Synthetic coding sequence
atgaagtgtgagcattgtacccgcaaggagtgctccaaaaagaccaaaaccgatgaccaggaaaacgtgtctgctgacgctccttcacccgctcaggagaatggggaaaaaggagagtttcacaagctcgccgacgccaagatttttttgtcggactgcctggcttgtgactcttgcatgacggcagaagagggcgtccagctctcacagcagaatgccaaagatttcttccgcgtgctgaacctcaacaaaaagtgtgatacttcgaagcataaggtgctggtcgtgtcagtctgcccgcagtcgctgccttatttcgcagccaaatttaatttgagcgtgacagatgcatccagacgattgtgcggctttcttaaatctctgggatgggtgcggtatgccgaacgcgtcctcgggcgtcctataacagctcatctgtgtactgcaaaaagcccccaacaggtcatgggctctttagtcaaagattatttcgccagacagcaaaacttgagcccagaaaaaatttttcatgtcattgttgctccttgctacgataaaaagcttgaagcacttcaagaatctctgcctcctgcgctgcatggtagtcgcggtgccgactgcgtcttgacatcggggacaggatcactttgggagtgcactccagtgataacagccacccaggaggccgcagcacgtgaatctctggagcctggccgacagagactacagagagacaagatcgccccactcgacagctcactgggaggcggaggtgaaattgctcagatcatggaacagggggacttatccgtccgtgatgcagctgtagacacttag

SEQ ID NO: 30760 - DNA, 471 bp, synthetic construct
  source 1..471: mol_type = other DNA; note = Synthetic coding sequence
taagggaaagcccagagaaagatctccgcaattcacattcttgatgtgctcgtgcttaacggaaccgatgtcagggagcagcacttcaaccagaggattcagcttgccgaaaaatttgtcaaggcggtttccaaacccagtcgtcccgacatgaaccccatacgggtcaaagaggtgtataggctcgaagagatggagaaaattttcgtgcggctcgagatgaagatcattaagggatcctccgggactccaaagttatcttatacaggtagagacgatcgacacttcgtcccaatgggcctctatatcgtgaggacagtaaacgagccttggaccatgggattctcaaaaagctttaagaagaagtttttttacaataaaaaaacaaaggattctacatttgaccttcccgcagactccattgcacctttccatttgccctccctcgcatgcctaagcaaaatggattag

SEQ ID NO: 30761 - DNA, 1200 bp, synthetic construct
  source 1..1200: mol_type = other DNA; note = Synthetic coding sequence
atggcaaccggcgatctgaagcgttcactgcggaacctggagcaggtgctccgtctattgaattaccctgaggaggtggactgcgttggcttgattaagggagatccggctgccagtcttccgataatttcctattcatttacatcctacagtccgtatgttactgagcttattatggagtccaatgtcgagctgatagcaaaaaatgacttacgctttatcgatgcagtgtacaagctgctgagagatcagtttaactacaaacctattttgacgaaaaagcagttcattcagtgcggcttcgctgagtggaaaatccagatcgtgtgcgatattctgaactgtgtcatgaaaaagcacaaagagctctcctcattacagaaaattcctagtcaacaaagaaaaaagatcagctccggaaagagcgaacctcccctgggaaatgagaagatatctgcggaggccgtgggcgtcgatatctccggacgttttatgacaagcggcaagaaaaaagccgtcgtcatccgtcacctatacaatgaggataatgtggacattagcgaggatacgctgagcccaattactgacgtgaacgaagcggtggacgtgtctgatctcaatgccactgaaattaaaatgcctgaagtgaaagtgccagagattaaggccgagcaacaggatgtcaatgttaatcccgaaatcacagccctgcagaccatgcttgcagagtgccaagagaatctcaagaagctgacgtcaattgaaaagaggctggattgcttagaacagaagatgaagggaaaagtcatggttgacgagaacacatggacaaaccttttgagcagagttacactcctggagacggagatgcttctctcaaaaaagaatgacgagttcatagagtttaacgaagtgagtgaagattacgcaagttgcagcgacatggatctgctaaatccccatagaaaatccgaagtggagaggccggcatcaattcccctgtcctcggggtacagcacagcatcgtcggactcaacccccagggcctctaccgtgaactattgtggactgaacgagatctctgagaattttccagcttggtcggctacatcctcttgtagtagcctgtcatggctgctgcggggacacacctcctacctgtctagccagagtttcgcgtggccactgagttgcgtttag

SEQ ID NO: 30762 - DNA, 819 bp, synthetic construct
  source 1..819: mol_type = other DNA; note = Synthetic coding sequence
atggctagccttctccaggatcaacttacgacagatcaggatctcctattaatgcaagaagggatgcccatgaggaaagtgaggtcgaagtcctggaagaagcttagatattttcgcttacagaatgacgggatgaccgtgtggcacgccaggcaggccagggggagcgcgaaaccttcattttcaatcagcgatgtggaaactatcaggaatggccatgactctgagctgctgaggtctctggccgaggaactacctttagagcagggctttactatcgtctttcacggccgtcgatccaacctcgatctgatggccaattctgtcgaagaggcccaaatttggatgagaggacttcaacttctcgttgaccttgtgactagtatggaccatcaggagcgcctggaccgctggctgtcagactggttccagcggggagataagaatcaggacggtaagatgtcttttcaagaggtgcagagactgctccaccttatgaatgtggagatggaccaggagtatgccttcagtctgttccaggctgccgacaccagccaatctggcacactcgaaggtgaggaattcgtacagttttacaaggccctcacaaagagggctgaggtacaagagctctttgagtctttttctgcagacgggcagaaattaacgctgttagagttcctggacttcctgcaggaggaacagaaagagcgagactgcacctctgaactggcgttggaattaatcgatagatatgagcccagcgattcgggggcttcagaagaagaccccggagagggcgaagaggtcaacacgtag

SEQ ID NO: 30763 - DNA, 360 bp, synthetic construct
  source 1..360: mol_type = other DNA; note = Synthetic coding sequence
atggacaagaatataggggagcagttgaacaaggcctacgaggctttcaggcaggcatgcatggaccgagattctgcggtcaaggagctccagcagaagaccgaaaattacgagcaaagaattcgcgaacagcaagaacagctgtccttacagcagactattattgacaagcttaagtcacagctattactggtcaattcaacccaggataataattatggttgtgtccctttgttagaggattccgaaacaagaaaaaataatctcacattagatcagccccaggacaaagtgataagtggcatagccagggaaaagttgccaaaagtggacatcgcatccgccgagagctcaatttag

SEQ ID NO: 30764 - DNA, 1881 bp, synthetic construct
  source 1..1881: mol_type = other DNA; note = Synthetic coding sequence
atgtgctcaacccttaagaaatgtggaacctacagaacagaggtggcagaatgccatgaccacggatccaccttccaggggagaaagaagggaggctcctccttcagggacaattttgataagcgcagctgccattacgagcacgggggatacgaacggccaccgtcacattgccaggagaacgatggctcagttgagatgcgtgacgtgcacaaggatcagcagcttcgccatactccctactctatccgctgcgagcggcgaatgaaatggcacagtgaggatgagattcggattacgacatggcgcaatagaaaacctccagaaaggaagatgtctcagaatacacaggacgggtatacacgaaactggttcaaggtgacaataccctatggcattaaatatgacaaggcctggctgatgaacagcattcagtcacactgctctgatcggttcacaccagtcgacttccactacgtacgtaatcgcgcatgcttctttgttcaggatgcgtccgcagctagcgctcttaaggacgtatcatacaagatctacgatgacgagaatcaaaaaatttgcatcttcgttaatcattccactgctccctattccgttaagaacaaactaaagcccggacaaatggaaatgctgaagctgaccatgaataaacgctacaatgtctctcagcaggctctcgacctccagaacctacggttcgaccctgacctaatgggtagagatatcgacataatcttaaaccggaggaattgtatggccgctacgctcaagattatcgaaaggaacttcccagagctgttgtccctcaatctctgtaacaataaactttatcagttagacggtctgagtgatattactgaaaaagctcccaaagttaaaacgctgaatctgtctaagaacaagctggagtcggcctgggaactcgggaaagtgaaggggcttaagctcgaggaactgtggttagagggaaatcccctgtgtagtaccttctctgaccagtctgcctacgtgtctgccattcgcgattgttttcctaagttgctgcgtctcgatgggagggaacttagcgcgcctgtcattgtggacatcgactctagcgagaccatgaagccctgcaaagagaacttcacagggtccgaaactttgaagcaccttgtgttacaatttttacagcagtactactcaatttatgacagcggggataggcagggactactcggagcatatcatgacgaggcttgcttctctctggctatccccttcgatcctaaggactctgctccctcctccttgtgcaaatatttcgaggattcaagaaacatgaagacactcaaggatccgtatctgaaaggcgaactgctccgcaggaccaaaagagacatcgtggattcgctgtccgccttaccgaagactcagcatgatctttcttccattttagtggacgtttggtgtcagacagaacgcatgctctgctttagcgtcaatggtgttttcaaagaagtggaggggcagagccaagggagtgtgctggccttcactcggactttcattgcaacccccggaagcagctcttctctatgcatcgtgaatgatgagctgtttgtcagggatgcctcaccccaggagacccagagtgcattctctatccctgtctcaactttaagctcatcctctgagcctagcctgagtcaggagcaacaggaaatggtccaggctttttcggcgcaaagtgggatgaagctggagtggagccaaaaatgcctgcaggacaacgagtggaactacacaagagcagggcaggcatttaccatgctgcaaaccgagggcaagatacctgccgaggcgtttaagcagatcagctag

SEQ ID NO: 30765 - DNA, 189 bp, synthetic construct
  source 1..189: mol_type = other DNA; note = Synthetic coding sequence
atggccatggccccatctccctctctggttcaagtgtataccagcccagctgccgtggccgtgtgggagtggcaggatggtcttggaacctggcacccttattcagccacagtgtgtagtttcattgagcaacaattcgttcagcaaaaaggtcagcgcttcggccttggaagtttagctcatagctag

SEQ ID NO: 30766 - DNA, 228 bp, synthetic construct
  source 1..228: mol_type = other DNA; note = Synthetic coding sequence
atgagattgagtctgcccctactgctcctcctgctaggagcttgggcaatacccggtggcctgggtgacagggcaccgcttacagctaccgcccctcagctggacgacgaggaaatgtacagcgctcacatgccagctcacttacggtgcgatgcctgcagggcggtggcttatcagaggctgtgtagttatccccctcatctgcccctgactgagcaacagtcctag

SEQ ID NO: 30767 - DNA, 2619 bp, synthetic construct
  source 1..2619: mol_type = other DNA; note = Synthetic coding sequence
atgggggattcggatgacgagtacgataggcgacgcagagataaatttagaagggagcgatctgactatgaccggagccgagaaagagacgaaaggcgcagaggggacgactggaatgacagggaatgggatagggggcgtgagcggaggagtcggggagagtatcgtgattatgacagaaaccgcagggaaagattctcgccaccgaggcatgaactaagtcctccccagaagcgaatgcgacgggactgggacgaacactcctctgacccatatcactcaggctacgagatgccttacgcaggtgggggaggagggcctacatatgggccaccccaaccctggggtcatcctgacgtccatatcatgcagcaccatgtgctgccaatacaagccagactggggagcatcgccgagattgatctcggcgtgccaccgcctgtgatgaaaacctttaaggagttcttgctgtccctggatgactcagttgacgaaaccgaagccgttaaaaggtataatgattacaagctggactttcgccgtcagcaaatgcaagatttctttctggcccataaagacgaggagtggttcaggtcaaagtaccacccagatgaagttggaaagagacgacaggaagccaggggggctctccagaatcgcctgcgggtgtttctcagtctcatggagaccggctggtttgataatctgctgctggatatcgataaggcggacgcaattgtaaaaatgctggatgctgctgtcattaagatggaagggggtacagagaatgatcttcggatcctggagcaggaggaggaggaggagcaggccggaaagcctggcgagccttctaagaaggaggagggacgagcaggtgcagggttaggtgacggcgaaagaaagactaatgataaggacgagaaaaaagaggacggaaagcaagccgagaatgatagcagcaacgatgacaagaccaagaaatcggaaggcgatggagataaagaagaaaagaaagaagatagtgagaaggaggccaagaagtcctccaagaagcggaatagaaagcacagcggagacgactcttttgacgagggatccgtttctgagagcgaaagcgaatccgaaagtggacaggcggaggaagaaaaggaggaagcagaggaagctctgaaggaaaaggagaagcccaaggaggaggagtgggagaaacccaaggacgccgctggactggaatgtaagccacgtccccttcacaagacatgttctctctttatgagaaacatcgcgcctaacattagccgagccgaaatcatctctctgtgtaaaagatacccaggattcatgagagtagccctgtcggaaccacagccagagcgacgtttttttagacggggatgggttactttcgatcgttctgtgaacatcaaagaaatttgttggaatttgcaaaatatccggctgcgggagtgtgaactgtccccgggagtgaaccgcgatctcaccagacgagtgcgcaacatcaatggaattacacagcataaacagatcgtgagaaacgatataaaactggctgccaaacttatacacacccttgacgacagaacccaactctgggcctcagagccagggacccctcccctcccaacgtccctgccatcacagaaccccatcctgaagaacataaccgattatctgatagaagaggtcagtgccgaggaggaggaactgttggggagttctggaggcgctcctcccgaggaacctcccaaagagggaaatcccgctgaaattaatgtggagagggatgagaaattaatcaaggtattggacaaattgctgctgtacctgaggattgtgcatagcctggactactataatacttgcgaatatcccaatgaggatgagatgcccaaccggtgcggcatcatccatgtgaggggacccatgcctccaaataggatctctcatggcgaggtcttggaatggcagaagactttcgaagaaaaactcacccccctcttaagcgtgagggagagtctctctgaggaagaggcccagaaaatgggcaggaaagacccggagcaagaggtggaaaaattcgtaacgtcaaacacacaggaactgggtaaagacaaatggctgtgccctctgtcgggaaagaagtttaagggtccagaattcgttcggaagcatatttttaataagcatgcagaaaaaattgaggaggtgaagaaagaggtagcgttcttcaacaactttttaacagatgccaagcgacctgctttgcccgaaatcaaaccggcacagcctcccggaccggcacaatctctgaccccaggactaccctacccccaccagactccccagggcctcatgccatacggtcagccaaggccacctatcctgggctatggagccggagctgtgagacccgcagtgccaacagggggtcctccatacccacatgctccatacggtgcgggtagaggaaactacgatgcctttcggggacaggggggttatcctggtaagcccaggaatagaatggtccggggtgacccgagggcgatcgttgagtacagagacctcgacgcccctgacgacgtagattttttctag

SEQ ID NO: 30768 - DNA, 483 bp, synthetic construct
  source 1..483: mol_type = other DNA; note = Synthetic coding sequence
taacccgaggacgtacaggccctggtgagtggcaaactggccctccgctatgccggaaggcaaacagaggcgttgaaatgtgtggcccaggcaagcaagaataggagtctggccgactttgagaaggcactgactgactaccgcgctgaactgcgcgatgatcctattatcagcacacacttggcaaagctctatgacaatttgctcgagcaaaatctcatccgagtgatcgagccatttagtagagtgcagatagaacatatctcttccctcattaagctctcaaaagctgatgtggagcgcaaactcagccagatgatccttgataagaaatttcatgggatcctggaccaaggggaaggagtgctgatcatctttgatgagccacccgtggacaaaacgtacgaagccgctctcgaaacaatccagaacatgagcaaagttgtagattctctatacaacaaagctaaaaaactcacctag

SEQ ID NO: 30769 - DNA, 3906 bp, synthetic construct
  source 1..3906: mol_type = other DNA; note = Synthetic coding sequence
atgtggaggagaaaacaccccaggaccagtggcggtacaagaggtgttttgagcggaaaccggggagtcgagtacgggagcggtcggggacatctgggtacatttgaggggagatggcgaaaactccccaaaatgcccgaagctgtgggcaccgacccatccactagccgcaagatggctgaactagaggaggtgactcttgatggaaaacccctgcaggcgctgcgggtcaccgacctgaaagctgcgctcgaacagaggggtctggcgaaatctggtcagaagtcggccttggtgaaaaggctgaagggtgccttgatgttggaaaacctgcaaaaacattctaccccacacgccgctttccaacccaatagtcagatcggtgaggagatgagccagaattccttcatcaagcagtacctggagaagcaacaggaactgcttaggcaaaggctggagcgagaagcacgtgaagcagcagagctggagggaaagagcagctctatctctgaagagaagggggatagcgatgatgagaagccgaggaaaggtgagagaagaagttccagggtgaggcaagctcgagccgcaaaactgtcagaggggagccaacccgctgaggaagaagaggatcaagagacaccaagtcgcaacctgcgcgtgagggcggaccggaacctcaagaccgaggaggaagaggaggaagaggaggaggaggaggaggacgacgaagaagaggagggagatgacgaggggcagaaatcaagggaagcacctattctcaaagaattcaaggaagaaggtgaagaaatcccacgtgtaaaacccgaggagatgatggatgagcgacccaaaactcgctcccaggaacaagaagtcctcgaacgcggtgggaggttcacgcggtcacaggaagaggctaggaagtcacacctggctaggcagcagcaagagaaagagatgaaaacgacctcacccctggaggaggaagaacgcgaaattaaaagctctcaggggcttaaggagaaatctaagagcccgtccccgcctaggctgacggaggaccgcaagaaagcaagtctcgtggcccttcccgagcagacagccagtgaggaggaaacaccgcctcccctcctgacaaaagaggcatccagccctccacctcatcctcagttgcattccgaagaggaaatcgagcccatggaaggtcctgcacccgctgttctcattcaactgagcccacctaataccgatgcggacacccgggagctcctggtctcccagcacaccgtgcagcttgtgggaggtttatctccactgagctctccatctgacacaaaggccgaatcgccggctgagaaggtgcccgaggagtcagtgctccccctggtccagaagtccactcttgccgactactccgcgcagaaggacctcgagccagaaagcgaccgctccgcgcagcctctccccttgaaaattgaggagctcgcattggcgaaaggaatcacagaagaatgtctgaagcaaccatcactcgagcagaaggaaggcagacgggctagccatacccttcttccttcccacaggctcaagcaatctgctgacagcagttctagtcgttcttccagtagctctagctcctctagccggagccggtcacgctcccccgacagctcggggagtcgcagccacagtcctctgcgctccaagcagagggacgtcgcccaggctaggacccatgccaatcccagagggagacccaagatgggctctagatcgacctcggaaagccgctcacgatccaggtctcgatccagaagtgctagctccaacagtagaaagagtctgagcccaggggttagtagggactcctctacttcatacactgagacgaaggatccatcttcgggacaagaagtggccacaccgcctgtgccccagctgcaggtttgtgaacccaaggagcggacaagtacatcatcatcctcagttcaggctcgcaggctcagccagcccgagagtgcagagaagcatgttactcagaggctgcagccggaaaggggctcacctaagaaatgtgaggccgaggaagccgaaccacctgcggcaacccagcctcagacatcagagactcagacttctcacctaccagaatctgaacgcatccaccatacagtggaggagaaggaggaggttaccatggatacctccgagaacaggccagaaaatgacgtgccggagcctccaatgccgatcgcagatcaggttagcaatgacgacagaccagaaggctcggtcgaggatgaggaaaagaaggagagctcccttcccaaatcttttaagagaaagattagcgtagtcagtgctactaagggcgtcccggctggcaatagcgacactgaaggaggtcaacctggacgcaagcgtaggtggggggcaagcacagcgacaacacagaagaaacctagcattagcataaccaccgaaagtctgaaatctttaatccctgacattaagcccctcgcgggacaggaagcagtggtggacctccatgctgatgacagccggattagtgaggatgaaacagaacggaatggagatgacggcacccatgataaagggctcaaaatttgcaggaccgttactcaggtagtgccagctgaggggcaagagaacggccagagagaagaagaggaagaggagaaagagcccgaagcagaacctcccgtgccaccacaggtttctgtggaggttgctctgccccctcctgcggaacacgaagtgaagaaggtgacactgggggatacacttacgcggcgaagcatctcacaacagaagtctggcgtaagcatcacaattgacgaccctgttagaacggcacaggtcccgtcacctccaaggggtaagatatctaacatcgtccatattagcaatctggtgaggccgttcacccttgggcagctgaaggaactactcggcaggactggcacccttgtggaagaagccttttggatcgacaagattaagagccattgcttcgttacttactccacagtggaagaggcagtcgccacccgcacagcactccatggagtgaaatggcctcagagtaatccaaaatttctgtgtgctgattacgccgagcaggatgaactggactatcaccgaggcctactggtggaccgaccctccgagaccaagactgaggagcaggggataccccgacccttacaccccccaccaccccctcctgtccagccccctcagcatcctcgggcagagcagagagagcaggagagagccgtaagagagcagtgggctgagagggagagagagatggaacggcgagagagaactaggtcagaacgggagtgggaccgggataaggtccgtgaaggcccacggtctcgctccaggagccgcgatagacggagaaaggaaagggccaagtctaaagaaaaaaaatctgaaaaaaaggaaaaggcccaggaggagccacctgctaaactgctcgacgacttattcagaaaaacgaaagccgctccctgcatatattggctccccttaacagattcacaaatagtccagaaagaggctgagcgggctgagagggcgaaggagcgcgaaaagcgtcgtaaggaacaggaggaagaggaacagaaagaaagggagaaagaagccgaacgcgaaaggaacaggcagttggaacgagaaaaacgtcgagagcactcaagagagcgcgatcgggagagagaaagggaacgtgagagggacagaggagatcgcgatcgcgaccgcgagcgtgatagggaacgcggaagggagagggatagaagagatacaaagaggcacagtaggagccgctcacgctccaccccagtgagggatcgcggaggccgtaggtag

SEQ ID NO: 30770 - DNA, 231 bp, synthetic construct
  source 1..231: mol_type = other DNA; note = Synthetic coding sequence
atgttgctcgagaatcttactgacaacgagagcgaaaacactaacctgaagaagaaggtttttgaaaaggaggctcacatacaggaactgtcctgtcttttccaaagcgagaagtctctcgaaaccaagatagccaaatggaacctgcagagccggatgaacaagaacgaagctatagtgatgaaggaggcatcacgacagaaaaccgttgcactaaagaaggcttcttag

SEQ ID NO: 30771 - DNA, 1749 bp, synthetic construct
  source 1..1749: mol_type = other DNA; note = Synthetic coding sequence
atggaggtgcgggctagtctgcagaaggtgtccggaagcagcgactcagtggcaaccatgaactctgaggagttcgttcttgtccctcagtatgcggacgacaacagcaccaagcacgaggaaaaaccacaacttaaaatagtgtccaatggagatgagcagctcgaaaaagcaatggaggagatcttgcgggactccgagaagagaccttctagtctcctggtggattgtcaatctagcagcgaaataagcgaccattcctttggggacatccccgcatcccagaccaataagccctccctccagttaatactggacccatccaatactgaaatcagtactccacgcccaagcagccccggaggtcttcctgaggaagatagcgtgctgttcaataagctgacttacttaggatgtatgaaagtgtccagcccaaggaatgaggtcgaggccctccgcgcaatggccactatgaagtccagtagccagtaccccttccctgttacgctgtacgtgcctaatgtccctgaggggagcgtgaggattatcgatcagagctccaacgtggagatcgcctcattccctatttacaaggtgcttttttgcgcaagaggccacgacggtacgacagaatcaaactgctttgcctttacagagtcgagccatggttccgaggaattccagatacacgtattcagttgcgagattaaagaagccgtctcacgcatactgtattcattctgtacggcttttaagcggtcctctagacaggtctctgacgtgaaagattcagttataccaacgcccgattccgatgtgtttaccttttctgtcagcttagaagtgaaagaagacgatggaaaagggaacttcagacttctggtcattcctataccttttgagtatttcagcccagtgcccaaagacagagataaattctatttcaaactcaagcagggaatcgagaaaaaggtggtgatcactgtacagcaactatcaaataaagaactagccattgaaagatgctttggaatgctactttccccagggcgtaacgttaagaacagcgacatgcatctgttagatatggagtctatgggcaaaagctatgacgggcgagcttatgtcatcaccggtatgtggaacccaaacgcaccagtttttctggcattgaatgaagagacacctaaagacaaacaagtctacatgactgtagcagtggatatggtggttaccgaagtcgtcgaacccgtgaggtttctcctggaaaccgtggtgcgtgtgtaccctgccaatgagaggttctggtatttcagccgaaagacctttactgaaacttttttcatgagattgaagcagagcgaaggaaaaggacacactaatgcaggagatgctatttatgaagttgtaagcctgcagagggaatcagacaaggaggaacccgtgacacccactagtggagggggtcctatgagcccccaggacgacgaggctgaggaagaaagcgacaacgaattatcctccggcaccggtgacgtctctaaagattgtccggagaaaatactatattcctggggtgagctgctgggtaaatggcactctaatctgggagctcggcctaaaggcttgtcaacgctggtgaaaagcggggtccctgaggcattacgggctgaggtgtggcagcttttggccggttgtcatgataatcaggcgatgctcgatcgatataggatccttattaccaaatag

SEQ ID NO: 30772 - DNA, 138 bp, synthetic construct
  source 1..138: mol_type = other DNA; note = Synthetic coding sequence
atggatgccgactccgacgtggccctggacatcctgatcacgaacgtggtctgcgtcttcaggactcggtgtcatctaaacttgagaaagattgcactggagggcgcaaatgttatctacaaacgggatgtgggctag

SEQ ID NO: 30773 - DNA, 762 bp, synthetic construct
  source 1..762: mol_type = other DNA; note = Synthetic coding sequence
atggaggatgccccacagaggcttcgatggcaggcccatctggagttcacgcataatcacgacgtgggggacctcacttgggataagattgcggtgagccttcctcggagtgagaaattgcggtccctggtgctggctggaataccccatggtatgagaccccagttatggatgaggctctccggcgctctgcagaagaagcgcaatagcgaattgtcatatcgcgaaattgttaagaattccagtaatgacgagactatagctgccaagcaaatagaaaaggatctcctgcgaacaatgcccagcaatgcctgttttgcttccatgggctctatcggtgttccacgcctgagacgggtgctgagggctcttgcctggctctatcctgagatcgggtactgccagggaaccgggatggtcgcagcatgtctgctcctctttttagaggaagaagacgcgttttggatgatgagtgccatcattgaagacctgctaccagcctcctacttctcaacaaccttgctgggagtccagacagaccaacgggtcttacgacacttgatcgtacagtacttgccaaggctggacaaactcctgcaggaacatgacattgagcttagcctaatcacattgcactggttcctgacggcctttgcctccgtggtggacatcaagctactgctgcggatttgggacctctttttctacgaagggagtcgcgtgttgttccagctaaccctaggaatgttgcatttgaagtag

SEQ ID NO: 30774 - DNA, 336 bp, synthetic construct
  source 1..336: mol_type = other DNA; note = Synthetic coding sequence
tgaccattggttaaggttcagatcttcggggtcagactcgatacagcaaggcaagagaccaactacgtggagaataatgggtttaatccatactggggccaaacactgtgtttcagggtcttggtgcccgaactggctatgctgaggtttgtggtgatggattatgattggaaatcccggaatgacttcatcggacagtacaccttaccatggacttgcatgcagcagggctatcgccacatacatttgcttagtaaggatgggattagtctgaggcctgccagcattttcgtatatatctgcatccaggagggattagagggagatgagtcctag

SEQ ID NO: 30775 - DNA, 552 bp, synthetic construct
  source 1..552: mol_type = other DNA; note = Synthetic coding sequence
atgatgcagatatgtgatacctataaccaaaaacactccctgtttaacgccatgaacaggtttatcggggctgttaataacatggaccagaccgtcatggtacctagcctcttgcgcgatgtccctctggctgatcccggactcgacaatgacgttggcgtggaagtgggcggaagcggaggctgcttagaggagcgtacaccaccagttcccgactctggttctgccaatgggtcctttttcgctcctagcagggatatgtactctcattatgtcctgctaaaatcaatccggaatgatatcgaatggggagtgcttcatcagccaccaccaccagctggctcagaggaggggagtgcctggaagagtaaagacatcctcgtcgatctagggcacttggaaggggcagacgcaggcgaggaggatttagaacagcagtttcattaccacttgcggggtctgcacaccgtattgtctaaactaactaggaaagcaaatattcttaccaaccgctataagcaggaaattggctttggcaattgggggcactag

SEQ ID NO: 30776 - DNA, 1215 bp, synthetic construct
  source 1..1215: mol_type = other DNA; note = Synthetic coding sequence
atgatgcttagcacggaaggaagggagggttttgtcgtgaaggtacgtggtttgccctggagctgcagcgctgacgaagtgatgagattttttagtgactgtaagatacagaatggaacaagcggtattcgctttatttacactcgcgagggcagacccagcggggaagctttcgtagagctggaaagtgaggaggaggtgaagttggccctaaaaaaggatagggagactatggggcacaggtacgttgaagtcttcaaatctaatagcgtcgagatggattggatgacactgccagtagacttccaaggtcgcagtacaggcgaggctttcgttcagttcgcttctcaggaaatcgccgagaaagcattaaaaaaacataaagaaagaattggccatagatacattgaaatcttcaagagctctagggccgaggtgcgtacgcactatgatcctcctaggaagctgatggcgatgcaacgacctggaccatatgaccgcccaggggcaggacggggttataattccatcggtcgcggagccggatttgagcggatgcgtaggggcgcatacggtggtgggtatggcggatatgacgactacggaggttacaacgatgggtatggcttcggctctgatcgctttggaagggacctcaactattgcttcagcgggatgagcgaccacaggtacggcgacggaggatcttccttccagtccactaccggacattgtgttcacatgcgaggacttccgtatagggctactgagaacgacatttacaacttcttcagcccccttaaccccatgcgcgttcacatcgagattgggcctgacgggagagtgaccggcgaagccgacgtggagtttgcgacacacgaagacgcagtggctgcgatggcgaaagataaggcaaacatgcagcatcgttatgtagagctattccttaactccaccgcgggaaccagtggaggggcttatgatcactcatacgtggagctgttcctcaactcaactgcaggcgcttcaggtggagcttatggctctcagatgatgggcggtatgggattaagcaatcagtccagctacggaggtccggcatcacaacagctttctgggggatacggaggtggatacgggggtcaaagttctatgtccggatatgatcaagtgctccaagagaatagtagtgattaccagtccaatttggcgtag

SEQ ID NO: 30777 - DNA, 1545 bp, synthetic construct
  source 1..1545: mol_type = other DNA; note = Synthetic coding sequence
atgagcatttctagcgatgaggtcaactttcttgtgtaccgctatctacaagagtcaggttttagtcacagtgcgtttacgttcggcatagaatcccacatctcccagagcaatattaacggtgcactggtgcctcccgcagcccttatttctataatccagaagggtctgcagtacgtggaggccgaagtgagtatcaacgaagatggtaccctgttcgatggaaggccaatcgagtcccttagcttaattgacgcagtgatgcctgatgtggtccagactcggcagcaggcctacagggataagctggcacaacagcaggcagccgctgcagcggcagccgcagcggctgccagtcagcagggatcggccaaaaacggcgaaaacacggctaacggcgaggagaacggggctcacaccattgcaaataaccacacagacatgatggaagtagacggagatgtggagatacctcccaataaggcggtggtgcttcgaggacatgagagtgaggtgttcatctgtgcctggaaccctgtctccgatctgcttgccagtggaagcggcgattccacagccaggatttggaatctctcagagaattctacctctgggagcacccagcttgtcctccgccactgtatccgggagggaggccaagatgtgccctcaaataaggacgttacttccctggactggaacagcgaggggaccttgctggcaacaggatcttacgatggatttgcgagaatttggacaaaagacggcaacctggctagtaccttagggcaacacaaaggcccaatatttgctctaaaatggaacaaaaaggggaactttatcctgtctgctggagttgataagactaccatcatctgggatgcacacacaggcgaagcgaaacagcaatttccctttcatagtgcccctgcacttgatgtcgactggcaatccaacaacacatttgcgtcttgttcaacagacatgtgtatccacgtatgcaagctcggccaggaccggcctatcaagacattccagggtcatactaatgaagtcaacgccatcaagtgggaccctacggggaatctattagcctcttgctctgacgacatgactctcaagatctggagtatgaagcaggacaactgtgtgcacgacttgcaagcccacaataaagaaatttatactataaaatggtcgcctacgggacccggaacaaataatcctaatgctaatctgatgctcgctagcgcctcttttgattccacggtgcgcctctgggacgtggaccggggaatttgtatccatactcttacaaagcatcaagagccagtttatagcgtggcgttcagccctgatggtaggtatctggcctccgggagctttgacaagtgtgtgcacatctggaatacacagaccggggctctcgtgcattcatatcgcggtaccgggggtattttcgaagtctgttggaatgccgcaggggataaagtaggagcttcggcaagcgacggctctgtctgtgttctcgatctgcggaaatag

SEQ ID NO: 30778 - DNA, 2928 bp, synthetic construct
  source 1..2928: mol_type = other DNA; note = Synthetic coding sequence
atgaaattcgtgtcagaggacctgcatcggtgtgccctcctgacagctgactccttcggcgacccattctttcctagaaccacgcaaatcctgctggagtaccagcttggacgctgggtgccaaggctgagggagcccagagacctatacggtgtgagcagcagcgggccattatctcccacaagatggccttaccattgcgaggtaattgatgagaaagttcagcacattgattggacccctagctgtcctgagcccgtgtatattcctaccgggcttgagaccgagcccctctatcccgactcgaaggaggctactgtagtgtatctcgcggaggatgcttataaggaaccctgtttcgtttactcccgtgtggggggaaacaggacacctctgaaacagccggtggattacagagacaacacattgatgtttgaagctaggtttgagagcggcaatctgcagaaggtggtgaaggtggcagagtacgagtaccagctgacagttagaccagacctgtttactaacaagcacacccaatggtactattttcaggtgaccaacatgagggcaggtatagtttaccgctttacaattgtcaacttcactaaacctgcttcattatattcccgaggcatgcgtcctctcttttactctgagaaggaggcaaaggcacaccatattggctggcagcgcataggtgaccagattaaatactatcgtaacaacccagggcaggacgggagacattacttttcactgacttggacatttcagttcccacacaataaggatacatgctatttcgcgcactgctacccctacacatacacgaacttgcaagagtatctgagcggcatcaacaatgatcctgttcggagtaagttttgcaaaatccgtgtactctgccatactttggcgaggaacatggtgtatattctcactattacaacccccctcaaaaacagcgactccaggaagaggaaagcagtcatcctgaccgcccgtgtccaccccggagagacaaattcctcgtggattatgaagggatttctagactacatccttggtaacagttcggacgcgcaactgttgcgggacacattcgtgttcaaggtggttcccatgttaaatccggacggtgtcatcgtggggaattatagatgttcactggccggtcgcgatcttaatcgcaattatacttccctgcttaaggagtccttccctagcgtctggtacaccagaaacatggtacatcgcctcatggagaaacgcgaagtgatcctctactgcgacctccacggccactcacggaaggaaaacatttttatgtacggctgcgatggtagtgaccggagtaagactctgtacctgcagcagcgcatcttcccactaatgctgtctaaaaattgcccggacaagttctccttcagtgcttgcaagtttaacgttcaaaagtccaaggagggcacgggaagggtggtgatgtggaaaatgggcatcaggaactctttcactatggaagcgacattctgtgggtcaacactggggaacaaacgcggaactcactttagcacaaaagacttggagtccatgggctatcacttctgcgatagcctgcttgactactgcgatcccgaccggacaaaatactacagatgcctgaaggagctggaggaaatggaacggcacataacgttggaaaaggtttttgaggatagcgatacaccggtaatcgacatcacgctggatgttgagagctcctccagaggcagcgacagctccgaaagcattgactcattgacgtacttgttgaagctgacaagccaaaagaaacatttaaagaccaagaaggaaaggaattctacaatcgcaagccaccagaacgccagaggccaagaggtgtacgatcggggtcacttactgcaacgacatacccagtctaactccgacgtcaaggataccaggcccaacgaaccagatgattacatggtggactattttaggcgacagctgcctaaccaggggctggcccattgtaagctgcgattacccggtagtaggcacagccccgctagcgctagccgagtggcaggcaccacaggcaccaggcaccacacatggcttatatttgtcttccttgtggaaatgggaaagaaaattccgttgaaaggcactgatttatatggtaactgctttaaggtgacttctttgcaaagcccgatgggaaagcaaacttccacatggactgagaagactaggatccctacagaggacctccaccataatctgaagtctaaaataaaggagtgtatctcattccagtccaagaagacaggcatcaactggacggatgatgagaaacggagttacaaggataaagggatagtgcagacccaggaaattttacagtacctgctgcctattgtgcacagcactaaaaacatgcagactacccagattaagcaactattcaaccctaggaccaattttcaaatacaacaccagctgaatcccgctacgtgtcgcaacatcaaaaagtatagcactagctggactgcacccaggaaccatccctttgtgattcagggggatgtgatggcaaattcatctgagtgggttcagtcaaaaccacataggtccctggagagcctatcacctttgaaaggccctaagaaaaacaaacactcgcagatctgggccattaaaaatgaggacataaaacctctctccagtaagtgggagacagcctcctccagctttggaatggacgctaatgtcctgaagtataaatccttacaggccgaggagacgaaccagcaaagtagtaaacacaccgccctgcatctcacaaaaaataaagatgagcaagcaaataagaatgatggccagcctaccctgtaccttaagttccagcgcgagtcctag

SEQ ID NO: 30779 - DNA, 1626 bp, synthetic construct
  source 1..1626: mol_type = other DNA; note = Synthetic coding sequence
atgagcagcagcggatatcctccaaaccaaggcgctttctccacagagcagagtaggtacccaccacattccgtgcaatacactttcccgaatacccgacaccaacaggaattcgcagtgcccgattacagatcatcccatttagaggtgtcccaggcaagtcagctcctccagcagcagcagcagcagcagctgcgcaggaggccctcgctgctgagcgagtttcacccaggctccgatcggcctcaggagcgaagaacgagttacgagccatttcatcctggtccctctcctgttgaccatgatagtctggagagtaagcgaccgcgacttgaacaagtctccgattcgcactttcaacgggtgtccgcagccgtgttaccactcgttcacccgcttcctgaaggccttagggcatccgccgatgctaagaaagatcctgcatttgggggaaaacatgaagcaccatcctcaccaatctcaggccagccatgcggcgatgaccagaacgcgtccccttccaagttatctaaggaagaacttattcagtctatggacagagtagacagggagatcgctaaggtcgagcagcaaatcttaaagctcaaaaagaaacagcaacagctggaggaagaagccgctaagcccccagaacccgaaaaaccagtcagcccacccccagtcgagcagaaacatcgttcaattgtgcaaatcatatacgatgaaaacagaaagaaagccgaagaagcacacaagattttcgagggattgggacccaaggtcgagctgccactctacaaccagccctcagatacaaaggtgtaccacgagaacatcaagaccggagtgccggcacgtcggatgatgaagaaccaggtgatgaggaagaagcttatcctattttttaaaagacgtaatcacgccaggaaacagagggaacagaaaatttgtcagcgctatgaccagctgatggaagcctgggaaaagaaggttgacagaatcgaaaacaacccacgaagaaaggctaaggagtccaagactcgggagtattacgaaaaacaattcccggagatcagaaagcagcgcgagcaacaggaacgattccaacgcgtgggtcagcgcggagcaggactaagcgccacaatcgctaggtctgagcacgaaataagcgaaatcatcgacggcctgagtgagcaagagaataacgaaaagcagatgcggcaactcagtgtcattccaccaatgatgttcgacgccgagcagcgtagggtaaagttcatcaacatgaatggcctgatggaggaccccatgaaggtctataaagataggcagttcatgaacgtgtggaccgatcacgaaaaagagattttcaaggataagttcattcaacacccaaaaaattttggactaattgccagttatctagagcgcaagagcgttccggattgtgttctgtactactaccttactaagaagaacgagaattataaggctctggtacgacggaactacggtaaaaggagaggtcggaaccagcagatcgctaggccctctcaggaggaaaaagtggaggaaaaagaagaggacaaagccgaaaaaacggaaaaaaaggaggaggagaaatag

SEQ ID NO: 30780 - DNA, 840 bp, synthetic construct
  source 1..840: mol_type = other DNA; note = Synthetic coding sequence
atgaaattcccttttctccccatcctggtaatgaagttcattgaaaaggcccagaatatgtccaaatatgtgttgattgacaccccagggcagatcgaggtattcacatggtcggccagtgggactatcatcaccgaggctctagctagctcatttccaacagtggtaatctacgtgatggataccagcaggagtaccaatcccgtcactttcatgtccaatatgctttacgcttgttccatcttatacaagaccaagcttcccttcatagtggtgatgaataagactgacatcattgatcactccttcgccgtcgagtggatgcaggactttgaagctttccaggatgctctgaaccaggagactacatacgtaagcaatttgacccgctctatgtcgctcgtgttggacgagttctattcaagcctgcgagtggtcggcgttagtgccgttttaggtacaggcctagatgagctcttcgtgcaagtgacatctgctgctgaagaatatgaacgggagtaccggcctgagtacgagcgcttgaagaaatccctggccaacgccgagagtcagcagcagagagagcagctagagagactgcgaaaggatatggggagcgttgctttagatgccggaacagccaaggattccctcagtcctgtgctccacccatctgacctgatcctgactcggggaactctggatgaagaggacgaagaagccgactcagatacagacgacatcgaccatcgagtgacggaggagagtcacgaagagcctgctttccagaacttcatgcaggaaagcatggcgcagtactggaaacgcaacaacaagtag

SEQ ID NO: 30781 - DNA, 1230 bp, synthetic construct
  source 1..1230: mol_type = other DNA; note = Synthetic coding sequence
atgaaggacactcaagatatccaagaagcttctaaggctatgcagaataaagtccacgagcaggaagataagaatgagaaacagaagcaaagggaagataagttaggcgtgtactcactcgtgcacttcagtcctaaaatgctaggctcagtggccacaacactgcccctgtcttcttcaaactcttccgggatgcccctgggctactacctatcctctcctcagattagccgagtgactatctccaccactggccaacttacttccaaggccaccgtggggagttgttctcgcgttgagaactcgcttgacgccagccccttctccgtgccgaagaagcaggatgaatctccaatgataggcgacggcgaagattattttttgtcattgttcggtgactctaagaaactgacggcacactccaactatacccaaaagaccctgaagtatttcagtatgattttggaggaggtgggccagttcacgtcaagctctctaggcgacgtggagatcgcagaggtgaacgtgaagggccttttcgtgaagctgattaactcctcacttgacaaggaaatggcaatcggcgatcacatcctccagcagaacgtgaacggacaaacaatctccctgtaccgctttctgccaaacattgtgatgcaggcaaactccactgtcaccgtatgggccgcagcaagcgaggccaagcaccagcctccttcggattttctatggaaagagcaggataagtttagagcttccccagactgcataaccatactgtgtaaaccaaatggccaggccatcgcgtggtatacacctatccactggaaacaggcatgggaaaaacttgacgccgacgtggagtttaaccgatgttccgtagtgtcgcctactttccgaaagagggtctttcagtggactgcttctaccgccaccatcactaaggaaaagcaggaccagcccaaaaaagacatttcaaattaccaggtggagcaggctcaggtcctgttgaagagggaaaaggagatcccccctacagtttttcctaatcggtctccctggtgtcagaatccatacgtttcagcccacccgtattgcccactgatcgagccccacaataccagcactgccggtggcaggctggaccgccagccacggacacgtagtacacgccctaatcgcgcttctgggtccaaaaaaaagaagacctcagaatctcagaaacagtag

SEQ ID NO: 30782 - DNA, 2442 bp, synthetic construct
  source 1..2442: mol_type = other DNA; note = Synthetic coding sequence
atgtccgaacagggtgatctcaaccaggctatcgcagaggagggcggtacagagcaagaaacggctactcctgagaacgggattgtgaagagtgagtctttggacgaagaggagaagttggagctccagcggagattggaggctcaaaatcaggagagacggaagtcgaagtcaggggctggaaagggcaaactgactcgctcattggctgtctgtgaggagtcttcagctcgcccaggcggagagtcactccaggaccaggagtctatccaccttcaactgtccagtttcagcagtctgcaggaggaggacaaatctcggaaagacgatagtgagagggagaaggaaaaagataagaacaaagacaagactagcgaaaagcccaagattcggatgctgtccaaggactgttcccaggagtataccgacagcaccggtatcgatctccatgagtttctgattaacacacttaagaacaacagtagagataggatgattttgcttaagatggagcaggaaataatagactttattgccgataacaataaccactacaagaaattcccccagatgtcttcatatcagcgtatgctcgtacaccgggtggcagcatacttcggcttagatcacaacgttgaccagaccggaaagtcggttatcattaataagacatcatctacacgcatccctgagcagcgcttttgtgagcatctgaaggacgagaagggggaggagtcccagaagaggttcatcttgaaacgagataattcttcaattgacaaagaggacaatcagtcggtttgctcacaagaaagtctgttcgtggaaaatagccgcctattagaggattccaatatatgcaacgaaacctacaaaaagcgccagttgtttcgcggaaatcgcgacggaagcgggagaacctcaggcagccgccagagtagtagcgagaatgaattgaaatggagcgatcaccagcgagcgtggtcaagcaccgatagcgactcctctaatcgaaacttgaagccagcaatgaccaaaaccgcgagttttggaggcatcactgtgctcaccaggggagatagcacttcctccaccagaagcacaggcaagctttcgaaagcaggctcggagagctcctcatccgccggatcttccggctcactcagtcggacacatccgccactgcagtcaacaccactggtgagtggcgtcgccgctggcagccctggttgcgtgccgtatccagaaaatggaattgggggtcaagtagcaccttcatctaccagctacatcctcctcccactcgaagcagccacaggcattccacccggttccatccttctaaacccccacacagggcagccctttgttaaccccgacggtacccctgctatttacaacccgcctaccagccagcaacccttacgctcggcgatggtgggtcaatctcaacagcaacctccacagcaacagccaagccctcagcctcagcagcaggtccaaccaccccagccccagatggcaggcccactcgttacacaatccgttcagggcttgcaggcctccagccagtccgttcagtatccagccgtcagttttccccctcagcatttgctgccagtttcgcccacccagcatttccctatgcgggatgatgtagccactcaatttggacagatgacactttctcggcagtcgtccggagaaacacctgagcctccttcagggcctgtctaccccagcagcctaatgccccagcctgcccagcagccttcatacgtcatcgctagtaccggccagcagctgcccacgggaggatttagcggcagcgggcctcctatctcgcaacaggtgttgcagcctcccccatctccccagggcttcgtgcagcagcctccgccagctcagatgcctgtgtattattatccttcaggtcaataccctacttctacaacacagcagtatcgtcctatggcaccagtgcagtataacgcccaaaggtcgcagcagatgcctcaagctgctcagcaggcaggctaccagccagtgctgtctgggcagcagggcttccagggtctcattggtgtccagcagccaccccaaagtcagaacgtgatcaacaaccaacagggtactccagtccaaagtgtcatggtgagctatcctaccatgtctagttaccaggtgcccatgacacagggctcgcagggcttgccacagcagagctatcagcagcctattatgctcccgaaccaggctgggcagggctccctccccgcaacaggcatgccagtttattgtaacgtaaccccaccgaccccgcagaacaacctacgcctcatcggccctcactgcccctcatcaacggtgcccgtgatgtcagcttcatgcaggaccaactgcgcctcaatgtctaacgccggatggcaggtgaaattctag

SEQ ID NO: 30783 - DNA, 1773 bp, synthetic construct
  source 1..1773: mol_type = other DNA; note = Synthetic coding sequence
atgccatctcctcagctgttggtgttgtttggaagccagacggggactgcgcaggacgtaagcgaaagactgggccgagaggccaggaggcggaggcttgggtgtagagtacaggcactagatagctatccggtggtgaacttgataaacgagccactggtcatctttgtctgcgctacaacgggacaaggagacccgcctgataacatgaagaatttctggcgctttatttttcggaagaatttaccatcaactgcactttgccagatggacttcgccgtgctgggactaggagattctagttatgccaagtttaattttgtagccaaaaagctgcacagacggctgctccagctcggcggatccgcactgttgcccgtatgcctgggtgacgatcagcatgaactagggcctgacgccgcagtcgatccttggttgagagacctctgggaccgcgtccttgggctgtaccctcctcccccaggcctgacggaaatcccccctggagtgccactgccttcaaaattcactctgctcttcttgcaagaggcaccctctactggcagcgaggggcagcgcgtggctcatcccggaagccaggagccgccaagcgagagtaaaccatttctggcgcctatgatcagcaatcaacgggttaccgggccaagccacttccaggacgtgcggctcatcgagtttgacattttaggctccggaatttcattcgccgcaggggacgtggtactgattcaacccagcaactccgccgctcacgtgcagcggttctgtcaggtactgggccttgaccctgatcagctctttatgttacagccacgggagcccgacgtgtcttctcctacaagactgcctcagccctgttcgatgagacacctagtgtctcattacctggatatcgcttccgtgcctaggcgttctttttttgagcttctggcgtgcctcagtctgcatgagctcgaacgggaaaagctgctggaattttctagtgcgcagggacaggaagagctcttcgagtattgcaaccgaccaagacgcactatcctggaagtgctgtgcgatttccctcatacagccgctgccattcctcccgactacctgctggacctcatccccgtgattagaccaagggcattcagcatcgcatcctcacttctgatcttggtggcggtggtacagtttcaaacaaggctaaaggagcccaggagggggctgtgttctagttggttagcatcgctagaccccggacagggccctgtgcgggtccctctgtgggtgagacccggatctctcgcattccccgaaacaccggacaccccggtgatcatggtagggccagggaccggagtggcgccttttcgggctgccattcaggaacgcgtggctcaaggccaaaccggcaatttcttgttttttggctgcaggtggagggaccaggacttctactgggaagcagaatggcaagaactcgagaaaagagactgcctcaccctaatccccgcattcagccgggagcaggagcagaaagtgtacgtgcagcaccgcttgagagagctgggttctttggtgtgggaactcctggacaggcaaggtgcctacttctatcttgcaggaaatgctaagagcatgccggcagacgtatctgaagctcttatgtcaatcttccaggaggaaggcggactgtgctcccccgacgctgctgcgtaccttgctcgattacagcagactaggagatttcagacggagacatgggcctag

SEQ ID NO: 30784 - DNA, 2436 bp, synthetic construct
  source 1..2436: mol_type = other DNA; note = Synthetic coding sequence
atgccattgtccagtcccaatgccgctgccactgcatccgacatggacaaaaattcaggttctaactcctccagtgcgtccagtggctcatctaagggacagcaacctccacgaagtgcctccgctgggccagccggtgagagcaaaccgaaatccgacgggaaaaattcgtcaggcagtaagcgctacaatcggaagcgcgaacttagctacccgaagaacgaatcgtttaacaaccagtcacgccgaagcagctcacagaagtcgaagacattcaataagatgccaccccagcggggtggcggatcttctaagctcttttcctcgagcttcaatggcggacggcgagatgaggtcgcagaggcacagcgggctgaattttccccagcgcaattctctggtccaaaaaagattaatcttaaccaccttctaaattttacctttgagccccgtggtcagactggccatttcgagggtagtggtcacggcagttggggtaaacgtaacaagtggggacataagccatttaataaagaactgtttctgcaggccaattgtcagtttgtggtgtccgaggaccaggattacacagcacactttgctgaccccgataccctggtgaattgggactttgtagaacaggtgagaatatgttcgcacgaggtccctagttgccccatttgtctgtacccaccaactgccgcaaaaatcactcggtgcgggcatattttctgctgggcctgtatcctgcactatcttagcctgtccgagaaaacctggtccaaatgtccaatctgttatagctccgtgcataagaaagacctgaagtctgtggtggctacagagtcccaccagtatgttgtgggggacacgattactatgcagctaatgaagagggagaagggtgtgctcgtcgcactgccaaaatcgaagtggatgaacgtcgaccaccctattcatctgggcgacgagcagcacagccaatactctaaattgctgcttgcgtccaaggagcaggtgttgcacagagtggtcctagaggagaaggttgccctcgaacaacagctcgccgaagagaaacacactcccgaaagctgttttatcgaggctgctattcaggaactcaaaacacgggaggaggccctcagcggactggccggaagccgcagggaagttacaggtgtcgtggccgcactagagcaactggtgctaatggctcctttggccaaggaatccgttttccagccaagaaagggcgttctcgagtatctctctgccttcgacgaagaaactactgaggtatgctcactcgacaccccctcccgccctctcgcgctccccctcgtagaagaagaagaagcagtgtcagagccagagccagaaggcctccctgaggcgtgcgacgacctggaactggcagatgacaacctcaaggaaggcaccatttgtaccgaatcttctcaacaggaaccaatcactaagtcgggcttcacgcgcttgagctcttccccttgctattacttctatcaggccgaggatggacagcacatgtttctacatcctgtcaacgtgagatgcctggtgagggagtacgggagtctagaacggtcccctgagaaaataagcgcaaccgtcgtagaaattgcaggatacagcatgagcgaggacgttaggcagcggcataggtacctctctcatcttcccctgacttgcgagttttccatttgcgagctggcgttacaaccacccgtggtgagcaaagagaccctggagatgttctcagatgatattgagaagagaaagcgtcagcgccaaaaaaaagctagggaagagagacgaagggagcgacggatcgagattgaggagaacaagaaacaaggcaagtaccctgaagtgcatatcccattagagaatctgcagcagttccctgcctttaactcatacacctgctccagcgactccgcactgggcccaacttctactgaagggcacggagctctgagcattagccccttgtcccgttctcctggcagccacgcagattttttgctcacaccactcagtccgacagcctctcaagggagtccatcattctgtgtaggcagcctggaagaggactccccttttccctccttcgcgcaaatgctgagagtgggaaaggccaaggcggatgtctggcccaagacagcgccaaaaaaggatgagaacagcctggtacctccagcacctgtagattctgatggagagtcagataattccgaccgggtgcccgttccatcctttcaaaacagcttctcccaggccatagaagctgcatttatgaagctggataccccagcgacctcagatcccttatctgaagagaagggcggaaaaaagagaaagaaacaaaagcagaagctgcttttctcaacttcagtggtgcacacaaagtag

SEQ ID NO: 30785 - DNA, 189 bp, synthetic construct
  source 1..189: mol_type = other DNA; note = Synthetic coding sequence
atgcccgagatcagggtcacccctcttggtgcctgccctgtgctgagctggaaccttgtgctgccccctgggagggggagcagggcacctagctctaccgacactcggactggctttcacgtgcttccccatggtgtgtctgccagctctgagggcgctcctagaccaggggtggacaccgttctgtag

SEQ ID NO: 30786 - DNA, 948 bp, synthetic construct
  source 1..948: mol_type = other DNA; note = Synthetic coding sequence
atgtcgggactcgtcttgggccagagagacgagcccgcaggacaccgattatctcaagaggagattctgggatcgacacggttggtgtctcaagggctagaggctctgcggagcgagcatcaggctgtccttcaaagtctgtcgcagacaattgagtgtctgcaacagggaggccacgaagaaggactggtgcatgagaaggctcggcagttgcggagatcaatggagaacatagaactgggtttgtccgaagctcaagtgatgttggccctcgccagccatctgtccactgtggagtccgaaaaacagaagctaagagcacaggtccggaggctgtgccaagagaatcagtggctcagagacgaactagctggcactcagcaaagacttcagagaagtgagcaggcagtcgcacaattggaggaggaaaagaagcatcttgagtttctggggcagttgaggcagtatgacgaggacggccatacatccgaagaaaaggagggcgatgcaacaaaagacagcctcgatgacctgtttccgaatgaggaagaggaggacccgtccaacggactttccagaggacagggcgctaccgccgcacagcaaggcggatacgagatccccgcacgcttgcgtacactgcacaacctcgtgattcagtatgccgcacagggtagatacgaagttgctgtgcctctctgtaagcaggcactcgaagatctggagcgaacctcggggcgaggacatccagatgtggccacgatgctcaacattctagcgctggtgtatagggatcagaacaaatacaaggaggccgctcacttattgaacgacgctctttctattcgggaatcaacactagggccagaccaccctgctgtctcaatcccttgtcccccacacccgactccaaggacaccacaccattgctgttttgggctgtcctag

SEQ ID NO: 30787 - DNA, 2055 bp, synthetic construct
  source 1..2055: mol_type = other DNA; note = Synthetic coding sequence
atggagaacctgcaaactaatttttcactcgtgcagggatcgacaaaaaagctgaatgggatgggggacgatggctcgccacctgccaaaaaaatgatcaccgacattcacgccaacgggaaaactatcaacaaggtgcctactgtaaagaaagagcacttggacgattacggagaagcgccagtggaaactgatggggagcacgtaaagcggacctgcacatccgtccccgaaactctacacctgaaccccagtctgaagcacactctcgcccagtttcacctgtcgagccagtcttccctggggggtccagctgcattttccgcacgtcactcccaggaaagcatgtcacctacagtattcctaccgctgccaagcccacaggttctacctggacctctgctgatcccaagcgatagctcaacagaactgactcagacagtgctggagggagaatcaataagctgcttccaggtgggtggcgaaaaacgtttgtgtctaccacaggttcttaacagcgtcctcagggagtttactctgcagcagatcaacactgtgtgtgacgagctgtacatttattgcagcagatgcacctctgatcaactacacatcctgaaggttctagggatactacctttcaacgcaccttcttgtggactgataacacttacagacgcacaaagactgtgcaatgccctccttagaccccgtacatttccccaaaatggctccgtgctccctgcaaaatcttctctcgcccagcttaaagagacaggctccgcattcgaagtggagcatgaatgcctcggtaagtgtcagggactgtttgcccctcagttctacgtgcagcccgatgccccatgcatccaatgccttgagtgttgcggcatgtttgcacctcagacattcgtcatgcacagccatcgcagcccggataaacgtacatgtcattggggattcgaaagtgcaaaatggcactgttacctgcatgtgaaccagaaatatctcggcactcctgaagaaaaaaagctgaagattatcctggaagagatgaaagagaagttctctatgcggagcggaaagagaaaccagagtaagaccgacgccccatcaggcatggagctccaatcctggtacccagtaataaagcaggagggggatcacgtatcccaaacacatagcttcctccacccctcttattacctctatatgtgcgataaggtagtcgccccaaacgtctctctgacgtcagcggtttcacagagtaaagagctcacgaagaccgaggctagtaaaagtatctctcgccagtcagagaaagcccattcctcaggcaaactgcagaaaacagtgagttaccccgatgtctccctggaggaacaagaaaaaatggacttgaagacgtcacgtgaactgtgtagcagacttgacgcaagtatttccaacaattctactagcaagcggaagtccgagagcgccacatgcaatctggtgagggacataaacaaagttggcattggcttggttgccgcagccagctccccactcctcgttaaagatgtcatctgcgaggacgacaaaggtaagatcatggaagaggtgatgaggacatacctgaaacagcaggagaagctgaatctcattttgcagaaaaaacagcaactgcagatggaagtcaagatgctatcctcttcaaaatcgatgaaggagttgactgaagaacagcagaacctgcaaaaggagctagagagtctgcagaatgagcatgcgcaaaggatggaggagttttacgtagagcaaaaagacctggaaaaaaaactcgagcagatcatgaagcaaaaatgcacctgtgattccaacctcgaaaaagacaaggaggcagagtacgccggacagctggccgaacttagacagaggttagaccacgctgaagccgaccggcaagagcttcaggatgagctgcgccaggaacgtgaggcccgacagaaattggagatgatgatcaaggagctaaagctccagattctgaagtcatctaaaaccgcaaaggaatag

SEQ ID NO: 30788 - DNA, 4050 bp, synthetic construct
  source 1..4050: mol_type = other DNA; note = Synthetic coding sequence
atggaggaaaacgagtcccaaaagtgtgagccatgcctgccctattctgctgataggcggcagatgcaagagcaaggcaagggcaatcttcatgtcactagccctgaggatgcagagtgccggagaacaaaagaacggttgtctaacgggaactcgaggggatctgtgagcaagtcaagccgaaatatcccgcgacgccatacgctgggcggacctcggagcagcaaggaaattctgggcatgcagaccagcgagatggatcgcaagagggaggcctttctcgagcaccttaaacagaagtatccacatcatgctagtgcgattatgggacaccaggagaggctgcgcgatcagaccaggagcccaaagctgtcgcactccccccagcccccatcattaggggaccccgtggagcatctgtcagagacctctgccgattctctggaggctatgtccgaaggcgatgccccaacaccgtttagccggggtagccgcacgcgcgctagcctgcctgtagtgcggtctactaatcaaaccaaagaaagatctctgggcgtgttatatctccagtacggcgatgagactaaacagctgaggatgcctaatgaaattacttcagccgacaccattagagccctgtttgtgtcagctttcccccagcagttaaccatgaaaatgttggagagcccttctgtggctatttatatcaaagatgagtcccgaaatgtgtactacgagctaaatgacgtgaggaatattcaggatagatccttgttaaaggtgtacaataaggaccctgcgcatgccttcaatcacacgccgaaaaccatgaatggtgatatgcggatgcagcgggaactggtttacgcccgtggcgatgggcctggggcacccagacccggttccacagctcatcctccacatgctattccgaactcccccccatcaacacctgtgcctcatagtatgccgccaagcccatcacgaatcccatacggcggaacacgctcaatggtagttccagggaacgccactatccctcgcgatcggatatcttccctccccgtgtcaaggcccatctcaccgagcccgagcgccatcctggagcggagagatgttaaaccagatgaggatatgagtgggaagaacatcgccatgtaccgaaacgaaggcttctacgctgacccctatctttaccacgagggcaggatgtctatcgccagttctcacggtggccatccattggatgtgcccgatcacatcatagcttaccaccgcactgctatcagatctgcgagtgcttactgcaaccccagcatgcaggccgaaatgcacatggagcagtcactgtatagacagaagagcagaaaatacccagacagtcatctgccaaccctaggctccaaaacacctcctgcatctccccacagggtttccgatctaagaatgatagatatgcatgctcactacaatgcacacgggcctcctcacactatgcagccagatcgcgcttcaccatccagacaagcctttaagaaagaacctggtacccttgtgtatatagagaagccccgatccgccgctggcctgagtagcctggttgacctggggccaccgctgatggaaaaacaggtgttcgcatacagcactgccacaattcccaaagatagagagacaagtgagaaaatgatgaaaactacagctaaccgcaaccacacggactccgctggcacccctcacgtttccggcggtaaaatgctatccgcacttgaatccaccgtgccaccatcccagccacccccagtgggcacctcagccatacatatgagcctgctggagatgcgcaggagcgtcgccgagcttcggttacagctccaacagatgagacagttgcaactccagaaccaggagttattgcgtgccatgatgaaaaaggccgaattggagataagcgggaaggtgatggaaaccatgaagagactggaggatcctgtccagcgtcagcgggtgctcgtggagcaggagcgccagaaatacctgcacgaggaagaaaaaatcgttaaaaagctctgcgaactggaggactttgtcgaggatctcaagaaggactctaccgcggcttcgagactggtgacattgaaagatgtggaagatggagcatttcttcttaggcaagtcggtgaggccgtggctacactcaagggtgaatttccaactctacagaataagatgcgggcaatcctgcgtatagaagtcgaggccgtccgattcctcaaagaggagcctcacaagctcgattctcttctgaagcgagtccgaagcatgaccgacgtgctgaccatgcttcgaagacacgtgacagacggcctgttgaagggtacggacgcagcccaggccgcacagtacatggctatggaaaaggctaccgccgctgaagtgctgaagtcgcaggaagaggccgcacataccagtggccagccttttcacagtaccggcgctcctggggacgcaaagtccgaagtggtgcccctttctggcatgatggtccgccatgcccaaagcagccctgtcgtaattcagccatctcagcactccgtggctctgcttaaccctgcacaaaacctgcctcacgtcgcgtctagccccgctgtgccacaggaggcaaccagcaccctgcagatgtcgcaggcaccccagtccccacagataccgatgaacggtagcgcaatgcagagtctatttatagaggaaatacactcggtctccgccaagaaccgagccgtctctatcgaaaaagccgagaagaaatgggaggagaagcgacaaaacttggatcattacaatggtaaggagttcgagaaactactggaagaggcgcaggctaacatcatgaaatcaattccaaacctcgaaatgcctcctgctaccgggccactgcccaggggcgacgcccctgttgacaaagtggaactgagcgaagactctcccaactctgaacaggatctcgagaaactcggcggtaaaagcccaccgccaccccctccaccgcctaggcgctcttacctgcccggttcagggctgaccactacccgatctggggacgttgtgtacacaggccgaaaggagaacataacagcaaaagcctcctccgaagatgcgggaccaagcccgcagacccgcgctacaaaatacccagcagaggaaccagcctcagcttggactccctcgccaccccctgtgacaacatcatcctctaaagacgaagaggaggaggaggaagaaggagataagatcatggctgaactgcaggcttttcagaagtgctctttcatggacgttaatagtaactcccatgccgagccatcaagagcggattcccatgtcaaagatactaggtccggagcaacagttccgcctaaagagaaaaaggggtctagcggcgctccccagacatctcgcatgcccgtgccaatgtcagcaaaaaatagacctgggacccttgataaaccgggaaagcagtctaaattgcaggatcccagacagtaccggcaggctaatgggtccgccaaaaagagcggcggagatttcaagcctacttcaccctcactacctgcatcgaaaatcccagctttgtcccccagctccgggaagtcatcatctctgcccagcagctctggggactcaagtaatcttcccaatcccccagctacaaagccatccattgcatcgaatcccttatccccacagacaggacccccagctcacagtgcatcacttatccctagcgtgtccaacgggtccttgaaattccagtctcttacccatactggcaaaggccatcacctgtcatttagcccacagagccaaaacggaagggcacctcctccccttagcttctcttcgagcccaccatccccggctagttctgtgagcctgaatcagggggcaaagggcacccgcaccatacataccccctctctgacgtcgtacaaagcccaaaatggttccagctcgaaggccactcctagcaccgccaaagaaacatcctag

SEQ ID NO: 30789 - DNA, 177 bp, synthetic construct
  source 1..177: mol_type = other DNA; note = Synthetic coding sequence
tgaatcatccacaaactggctatgcaactccgccacataggtgataacatagatcatcgcatggtgcgggaagatttacaacaggacggtcgggacgctctcgatcattttgttttcttttttttccggagagtacaagtcctcctgcacttcttttggaacaatcacctgctgtag

SEQ ID NO: 30790 - DNA, 429 bp, synthetic construct
  source 1..429: mol_type = other DNA; note = Synthetic coding sequence
atgcccgaagaccaggtgggcaagctcgaagccacggaaaacactatctctgccatggctgcggctgctgcggagcagcagcagttctatcttctgctcggaaacctattgtctccggacaacgtggtccggaagcaggccgaagagacttacgagaacatcccgggacagtcaaagattacattcttgctccaggcaatacgtaacacgactgccgcagaagaagcacgccaaatggcggcagttttgcttaggcgtcttctgagcagcgctttcgatgaggtttacccggcactgcccagcgacgtacaaacagccattaaatccgagttgctcatgatcatacagatggaaacacaatctagcatgcggaagaaggtgtgcgatatcgccgctgaactggctaggaatttaataggtgtgtactag

SEQ ID NO: 30791 - DNA, 93 bp, synthetic construct
  source 1..93: mol_type = other DNA; note = Synthetic coding sequence
atgggcagccggaagaaggagatcgccctgcaagtgaacatttccacccaggaactctgggaggagatgctgtcttcgaagggactgacatag

SEQ ID NO: 30792 - DNA, 645 bp, synthetic construct
  source 1..645: mol_type = other DNA; note = Synthetic coding sequence
atggccggagaaaactttgccaccccattccatggccatgtgggccgaggagcctttagcgacgtatatgagccagccgaggatacgtttctgttgctcaacgccctcgaagccgctgccgctgagttagccggtgtggagatatgcctcgaagttgggagtggctcaggtgtcgtaagcgcgttccttgcttctatgatagggcctcaggccttgtatatgtgtacagatattaacccagaagctgcggcttgcacactggagacagccaggtgcaataaagtgcacattcagccggtcatcactgacctggtgaagggcctgcttccaaggctcaccgagaaggttgatttgctagtattcaacccaccttatgtggtgaccccccctcaggaagttggctcacacggcattgaggcggcatgggcaggagggaagaatgggcgagaagtgatggacaggttttttcctctcgtcccagacctccttagccctaagggtcttttctatttggtcacaataaaggagaacaatcccgaagagatacttaaaatcatgaagaccaaggggctccaagggacgacagcgctttccagacaggccggtcaggagacgctgtccgtgttgaaattcacgaagtcttag

SEQ ID NO: 30793 - DNA, 1158 bp, synthetic construct
  source 1..1158: mol_type = other DNA; note = Synthetic coding sequence
atgggacgctggtgtcagactgtagcccgtgggcaaaggcctcgtactagtgctccttcacgggctggagccctgctgctgctgctgcttctcttacggtcagctggttgctggggggctggcgaagcgcctggtgctttgagcactgccgatcctgcagaccagtcggttcagtgcgtgcctaaagccacttgtcctagttctcggcctcgcctgctgtggcagacaccgaccactcagactctcccttcgactactatggaaacccagtttccagtctcagaagggaaagtggacccatatcgcagttgtggattcagctacgaacaggatcctaccctgcgggacccagaagctgtggccagaagatggccgtggatggtttctgtccgcgctaatggtacccatatctgtgcgggaacgatcattgcctctcagtgggtgctgacggttgcacactgtctcatttggagagatgtgatatactccgtccgggtcggatctccctggatagaccaaatgacccagaccgcgtcagatgtcccggtactgcaggtgataatgcatagtaggtatcgggctcaaaggttctggtcttgggtaggacaggctaacgatattggcctgctaaagctcaaacaagagttaaagtatagtaactacgtacggccaatatgtcttcctggcacggattacgtgctaaaagaccattctcgatgcaccgtcactggctggggcttgtccaaggctgatggtatgtggccacaatttcgcacaattcaagagaaagaggttatcatcctgaacaataaggaatgcgacaacttctaccacaactttacaaagattcctacattggtgcagattatcaagtctcaaatgatgtgcgcagaggacacccaccgtgaaaaattctgttacgaactgaccggtgaaccgttagtttgctctatggaaggcacctggtatctggttggcttggtgtcatggggcgctggctgtcagaaatccgaggcacctcccatctatttgcaggtgtctagctaccaacactggatctgggattgcctaaacggccaagctctagctttgcctgctcctagcaggaccctgttgcttgccttgcccctgcccttgagcctgctcgccgcactttag

SEQ ID NO: 30794 - DNA, 255 bp, synthetic construct
  source 1..255: mol_type = other DNA; note = Synthetic coding sequence
atgtccggacttgtcttgggtcagagagatgagccagccggtcacaggctatctcaggaggaaattttgggaagcaccagactcgtgagtcagggtttagaggctctgcgcagcgagcaccaagcagtgctgcaatcactgtcacagaccatcgagtgtctgcagcaggggggtcacgaggagggcttggtacatgaaaaggccaggcagctgcgcaggagcatggaaaacatagaactgggcttaagtgagtag

SEQ ID NO: 30795 - DNA, 483 bp, synthetic construct
  source 1..483: mol_type = other DNA; note = Synthetic coding sequence
atgtcagtgaactcggaaaagtcttcttcaagcgaacgacccgagcctcagcaaaaggccccacttgtacccccaccacctccgccacccccacctccgccacctccgctgcctgatcccactcctcctgagcctgaagaagaaattctggggagcgatgacgaggagcaggaagatcctgcagattactgtaaaggcggttaccatccggtgaaaataggcgacctgtttaacggcaggtaccatgtgatcaggaagcttggctgggggcattttagtaccgtctggttgtgctgggatatgcagggaaagcgctttgtcgcgatgaaagttgtgaagtcagcccagcactacactgagacagccctcgatgaaataaagcttctgaagtgtgttcgggagtccgatccttctgatcctaataaagacatggtggtgcagttaattgatgactttaaaatttctggtatgaatggcatatag

SEQ ID NO: 30796 - DNA, 66 bp, synthetic construct
  source 1..66: mol_type = other DNA; note = Synthetic coding sequence
atgaatcccgcttccgctcctccccctctaccacctccaggacagcaggtgattcacgtcacatag

SEQ ID NO: 30797 - DNA, 1212 bp, synthetic construct
  source 1..1212: mol_type = other DNA; note = Synthetic coding sequence
atgagtggcagcgatgggggactggaggaagagccagagctctccattaccctcacactgaggatgctgatgcatgggaaggaagttggctccattatcggcaaaaagggagagactgtgaagcggattagagaacagtctagcgcgagaattaccatctctgagggctcctgccccgagagaattaccaccattaccgggagtacggctgccgtgtttcacgctgtttccatgattgcttttaaacttgacgaggacctctgtgcagctccggctaacgggggaaatgtgagcagacctcctgtgaccctgaggctggttatccctgcaagccagtgtggatccctgattgggaaggccggtacaaagattaaggaaattagggagacaactggcgctcaggtgcaggtagcgggagatttattacccaactccactgaacgggctgtaaccgtgagcggcgtacccgatgccattatcctttgcgtcaggcagatctgtgcggtgatactcgaatctccgccaaagggagctacaatcccttatcatccctctctgagtctcgggaccgttctgctcagcgctaatcagggattctcagtacagggacagtacggggctgtcaccccggctgaagttacaaagttgcagcaactatctagccacgccgttccattcgctactcctagtgtcgtgcctggactggatccaggaactcagaccagctctcaggagttcttggtccccaacgacctgattggatgcgttatcggccgacagggaagtaaaatatccgaaataagacagatgagcggggcacatattaagattggtaaccaggctgagggggctggcgaacgtcatgttacaattacaggcagccccgttagcattgctctcgctcagtacctgattaccgcatgtttggagaccgccaagtcgacttccgggggtacccctagcagcgcccctgcagatctgcctgcccctttctcccctcctctcactgcactcccaactgctcccccaggcctgctcggcactccgtacgcaatctccctgtcaaattttattggactgaaaccaatgcctttcctggcactccccccagcatcccctggtccgcctcctgggctggccgcttatacagctaagatggcagcagccaacggaagtaagaaggccgaaaggcagaagtttagtccatactag

SEQ ID NO: 30798 - DNA, 5105 bp, synthetic construct
  source 1..5105: mol_type = other DNA; note = Synthetic coding sequence
atgggtaattccgactcacagtacacattgcaaggttccaagaaccactccaacaccattactggagccaagcagatcccttgttccctgaaaatacgcggaattcatgctaaggaggaaaagtctcttcacggctggggacatgggtcaaacggcgcaggttacaagtctcgttctctggcgagatcgtgcctgtctcattttaaaagcaaccagccgtatgctagtcggctcggcggacccacatgcaaagttagccggggtgtagcctacagtacacaccgaactaatgctcctggtaaggacttccagggtattagtgctgccttctccacagaaaacggattccactctgtgggccacgagctggccgacaaccatataaccagcagggactgtaatgggcacctgctaaactgctacgggagaaacgaatccattgccagcacacccccaggcgaggatagaaaaagccctcgagtgctgataaaaacactaggtaaactcgacggttgtctgcgtgtagagtttcataatgggggaaaccctagcaaggtgccggctgaagactgctcggagccagtccagttgctccggtactcccctactcttgcctccgagacatcgccagtgcccgaggccaggcgcggaagcagtgccgattcgctcccttctcatagaccgagccctactgattcccgtctccggtcttcaaaaggcagcagtctttcaagcgaatcatcttggtatgacagtccttgggggaacgccggtgaacttagcgaggcggagggctccttcctggccccaggtatgcccgacccctctttgcatgcttcctttccccctggagatgcaaagaaaccttttaatcagtcgtcttcgctgtcaagcctacgagagctctacaaggacgccaatctgggcagtttatctccttcagggatcaggctttcagacgagtatatgggaacgcatgcatccctgtcgaatcgggtttctttcgcttcggatattgacgtcccaagtcgtgtcgcgcacggggacccaatccagtacagcagcttcacactcccgtgcaggaagccgaaagcttttgttgaggacaccgctaaaaaggactccttaaaggcccgaatgcgcagaatatctgattggaccggatcactgtcccgtaagaagcggaagctgcaggagccccgttctaaggagggctcagactatttcgactctaggtccgatggccttaacacggacgtgcaggggtcctcccaagcaagcgcgtttctctggagcggcggtagtacacaaatactcagccaaagatctgaaagcacccatgcaattggctcagatcccctgcggcaaaatatttatgagaactttatgcgagagctggaaatgagtcggactaacaccgaaaacatagagacttcaaccgagacggctgagtcctcaagcgagagcctatctagtctcgagcaactcgatctactcttcgaaaaggaacaaggggtggtgcgcaaagccggatggctgtttttcaaacctctcgtgactgtccagaaggagagaaaattagagttggtcgcgcgacggaagtggaagcagtactgggtgacgctgaaaggatgcacactgttgttttatgagacgtacgggaaaaattctatggaccagtctagcgctcctcgatgcgccctgttcgcagaggattctatcgttcaaagtgtgccggagcatcctaagaaagaaaacgtgttctgcctgtccaactctttcggcgacgtgtacctcttccaggccacgtcccagacagatcttgagaattgggtcacagccgtccattccgcatgcgcgtcactgtttgctaaaaaacacggtaaagaggatacactgcgcctgttaaagaaccaaacaaaaaacctgctgcagaaaatcgatatggattctaagatgaagaagatggcagagctgcagctgtcggtggtttcagacccaaaaaacaggaaagccattgaaaaccaaatacaacagtgggaacagaatttggagaaattccacatggacctgtttcgcatgcggtgctatttggcctcactccagggcggagagctgccaaatcccaagtctctgctcgcagcggctagccgaccaagcaagctggctctcggaaggttggggatcttatctgtttccagttttcatgctcttgtgtgttcccgagacgattctgctctgaggaagaggaccttaagcctaacacagcgcggtagaaataagaaggggatattctctagtctcaaagggctcgatacactagcgaggaagggtaaagaaaaaaggcccagcataacccaggtggacgaactactgcatatctacggaagcactgtggacggggtgcctcgcgacaacgcgtgggaaatccagacttacgtgcatttccaggataaccacggggtgacagtcggcatcaaacctgaacaccgggtagaagatatcctcaccttggcttgtaaaatgcggcaactggagccctctcactatggccttcagctgcgaaaacttgtcgatgacaatgtggaatactgtattcctgccccatacgaatacatgcagcaacaggtttacgatgaaatcgaagtattccctctgaacgtgtacgatgttcaacttaccaagaccggtagcgtgtgcgatttcggattcgcagtgactgctcaggtggacgagagacagcatctctcacggattttcattagcgatgtgcttcctgatggtcttgcatatggagaaggcctgcgcaagggcaatgaaattatgaccctcaacggcgaagcagtaagtgacttggacctgaaacagatggaggcactgttcagcgaaaaaagcgttggcctcaccttaatagccagacctcccgatacaaaagccactctgtgtacatcctggagcgactcagacctgtttagccgagatcagaagagcctcctaccaccacctaatcagtcacaactgctggaggaattcctagacaactttaagaaaaacacagccaacgatttttccaacgtcccagacatcaccacggggctgaagagatcgcagacggacgggacattggatcaggtcagccatagggagaagatggaacagacctttcgctctgccgagcagatcactgccctgtgtcggtctttcaacgattcacaggcaaatggtatggagggcccacgagaaaaccaggacccgccaccccgttctctcgcaagacatctcagcgacgccgatagacttcgcaaagtcatccaggagttggtggacacggaaaaaagttacgtcaaagacttgtcttgtctattcgagttgtatctggaacctttacagaacgaaaccttcctcacacaagacgaaatggaatctctgttcggatcactcccggaaatgctggaatttcagaaggtgttccttgaaaccttagaggatggcattagcgcctccagtgacttcaacaccttggagactccatcgcagtttcgcaaactattgttcagcttaggcggatcctttttgtactacgcggatcatttcaaattatattctggtttttgcgcaaatcacattaaagtccaaaaagttctcgagcgggcaaagactgacaaagctttcaaagcttttctggatgccaggaaccccaccaaacaacattctagcacactagaaagctacctgattaagccagtgcaacgagtgttaaagtatccccttctcctgaaagagcttgtgtccctaacagaccaggagtctgaggagcactatcaccttacggaagctctgaaagccatggagaaggtggcatcccacataaacgagatgcagaagatctacgaggactacgggacagttttcgatcagttggtggccgaacagagtgggactgagaaggaggtaacggaactgtcaatgggtgagctgcttatgcactctactgttagctggcttaatccgttcctatcccttggaaaagcgcgtaaagacctcgaattgactgtgttcgttttcaaaagagccgtaattcttgtctacaaagagaattgcaagttgaaaaaaaagctgccttctaacagtagaccagctcataattctaccgacctggaccccttcaagtttagatggctgattcccattagcgctcttcaggtgcggttgggcaaccccgcaggcaccgaaaataattctatctgggagttaatccacacaaaatccgaaattgagggccgtcccgagacaattttccagttatgctgtagtgattcggaaagtaagactaatatcgtgaaagtcatccggtctatattaagagagaacttcaggaggcacatcaagtgtgagctccctctagaaaagacttgcaaagacaggcttgtgcccctgaagaacagggttccagtatccgcgaagctcgcttctagcagaagcctgaaggtcctgaaaaactctagttcaaacgagtggacaggggagacaggcaaagggactctgttggactctgatgagggctctctgagctcaggtacccaaagttctgggtgccctactgctgaaggtcgtcaggacagcaagagtacatcccccggaaaatacccccacccaggactagccgacttcgcagataatctgatcaaggagtcagatattctgagtgacgaagatgatgatcacaggcagactgtgaagcaaggatcccccacaaaggacattgagattcagtttcaaagactccggatttcagaggatcctgatgtgcacccagaggccgaacagcagcccggacccgagtctggggaaggacagaaaggaggagaacagccgaagttagtaagaggccatttttgcccaataaaacggaaggctaatagcacaaagagggaccggggtaccctccttaaggcgcaaatccgccatcagtccctggattcccagtctgaaaatgctactatcgacctaaacagcgttttagaaagagagttctccgtccagtcccttaccagtgtcgttagcgaagagtgtttctacgagactgaaagccatggaaagagtta

SEQ ID NO: 30799 - DNA, 408 bp, synthetic construct
  source 1..408: mol_type = other DNA; note = Synthetic coding sequence
atgggaaaatcctgtaaagtcgtcgtttgtggacaggcatctgtgggtaaaactagcatcctagaacagctattgtatggcaaccacgtggtcgggtctgaaatgattgagactcaggaggacatatacgtcggtagtatagagaccgaccgaggagtccgagagcaagtcaccatcgtagtcttgggcaataagtgcgacctccaggagcagcgaagagtcgacccagatgtggcacagcactgggccaagtctgagaaggtgaagctctgggaagtgagcgtggctgacaggcgctccctcctcgagcccttcgtctacttagccagtaagatgacccagccacaatcaaaatcagctttcccactgagtcgaaagaacaaaggatccggctcactggacgggtag

SEQ ID NO: 30800 - DNA, 3693 bp, synthetic construct
  source 1..3693: mol_type = other DNA; note = Synthetic coding sequence
atgcctcgaaaaggaacacagccctcgacagcgagaaggagagaggagggcccacctcctcccagccccgatggagcctcttctgatgccgagcccgagccccctagcggccgaactgagtcaccagccaccgctgccgagactgcctcggaagagctcgataatagatctctagaagaaattcttaacagtattcccccaccaccaccacctgccatgaccaacgaggccggagccccacgtctgatgatcacgcatattgtgaatcagaactttaaatcatacgctggggaaaagatacttgggccttttcacaaacgctttagctgtattatagggcctaacggctctggtaagtccaatgtgattgatagcatgctctttgtattcggatatagggcacagaagattcgatccaaaaagttgtcagttctcatccacaatagcgatgaacataaggatatacagtcttgtactgttgaagtgcactttcagaaaatcatagataaagagggcgatgactatgaagtgattcccaacagtaatttctacgtgtccagaaccgcatgtcgcgacaacacgtctgtttaccatataagcggtaagaagaagacctttaaagacgtaggtaatctgttgcgctcccacggcatcgacttggaccacaaccggtttctgattctgcaaggtgaagttgagcagattgccatgatgaagccgaaaggacagacagaacatgatgaaggcatgctagagtacctagaggacattatcggatgtggcaggctcaacgaacccattaaggtactttgccgacgggtggagatactcaatgagcaccgaggagaaaagctgaacagggtgaagatggtagaaaaggaaaaggatgccttggaaggagaaaagaacatcgcgatcgagttcctgacactggagaatgaaatttttagaaagaaaaaccatgtgtgtcaatactacatctatgagctccagaagcgtatcgcggagatggaaacacagaaagaaaagatacacgaagacaccaaggagattaacgagaagtcaaacatcctgagcaatgagatgaaagccaaaaacaaagacgtgaaagataccgaaaaaaagcttaacaagataactaaattcattgaagagaataaggaaaagttcacacaactggacctggaagatgtccaggttagggagaaactgaagcacgctacatcgaaggcaaagaaactggaaaaacagttgcagaaagacaaagaaaaggtggaggagtttaaatcgattccagccaaaagcaacaacatcatcaacgaaacaaccaccaggaataatgcactggagaaggagaaagaaaaggaagaaaagaagctcaaggaagtcatggactccctgaagcaggagacccaggggcttcagaaagaaaaggagtcaagagagaaggagctgatgggcttcagtaaatccgtgaatgaggctcggagcaagatggacgttgctcagagtgaattggatatttacctgagcagacataataccgccgtgtcacagctgaccaaagcgaaagaagccttgatcgccgcttcagaaacactgaaggagcggaaagcagccatccgggatatcgaaggcaagcttccgcagacagagcaagagctgaaggagaaagaaaaagagctccagaagcttactcaagaagagacgaactttaagtcattggtccacgatctgttccagaaggtagaggaagccaaaagcagcctggccatgaacagatcccgaggcaaagtgctcgatgcgatcattcaagaaaaaaagtccggccgtattccgggaatctacggcaggctgggagatttgggggcaattgacgaaaagtacgatgtggctatcagctcctgctgtcatgcgctggactatatcgtagtggacagtatcgatattgcacaggaatgtgtgaattttcttaaacgccagaacatcggcgtggcaacgttcattggcctggacaagatggccgtttgggccaagaagatgacagaaatccagactccggagaacaccccccgtttgtttgatctggtaaaagttaaggacgaaaaaatccgtcaggcattctacttcgccctgagagataccttggttgctgataatctcgatcaggccactagggtggcataccagaaggaccggagatggcgtgtcgttacactgcagggtcagattatcgaacagtctggtactatgacaggaggcggaagcaaggtgatgaaaggtcgaatggggagttccttagtaatcgaaatttctgaggaggaagtcaataagatggagtctcagctgcagaacgattcgaagaaggccatgcaaatccaagagcagaaagtgcagctggaggagagagtggtcaagctgcgccattctgagcgggagatgagaaacaccctcgagaaattcacggcatcaatccagagactcattgagcaagaagaatacttaaacgtgcaggtaaaagaactggaagccaatgtgctcgccactgcccctgataagaaaaagcagaagctcctggaagaaaatgtaagtgctttcaaaacagagtacgacgctgtcgcggagaaagccggtaaagtcgaggccgaggtaaagaggctgcataacactattgtggagataaacaatcacaagctaaaggcgcaacaggacaagttggacaaaatcaacaaacagctggacgagtgtgcctcagctataaccaaggcacaagtcgccattaagactgctgacaggaatctgcagaaggcccaggattcagttctgcgcaccgagaaggagatcaaagatacagagaaagaagtggacgacctaaccgcagaacttaaatcccttgaggataaagcagctgaagttgtgaaaaacaccaatgcagcagagatctccaagatttcactgcatccaattgaagataatccaattgaggagatttctgtgttaagtcccgaagatctggaagccattaagaaccccgattctatcaccaatcagattgcactcttggaagcacgctgccatgagatgaaaccaaaccttggcgctattgcagagtacaagaagaaggaggagttatatctgcagcgtgtggccgagctggacaaaatcacttacgaacgcgactcattccggcaggcttacgaagatctccgcaaacagcggttgaatgagttcatggctgggttttacatcatcaccaacaagctgaaagaaaattaccagatgcttacactagggggagatgccgagctggagctggtggactccttagacccttttagtgaggggattatgtttagtgtgagacctccgaaaaaatcctggaaaaagatctttaacctgtcggggggagaaaagacattgagcagcctggctctcgtcttcgcgttgcaccattacaagccaacacctttatactttatggatgaaattgacgccgcattggatttcaagaacgtttccattgtggcattttacatctatgagcagacaaagaatgcacagttcataattatttcactgcgaaataacatgtttgagatttcagatcggctcatcggaatttacaagacctataacataacgaaatcagtggctgtgaaccccaaagaaatcgcatccaaagggctttgctag

SEQ ID NO: 30801 - DNA, 267 bp, synthetic construct
  source 1..267: mol_type = other DNA; note = Synthetic coding sequence
atgcccgaagatcaggtcggcaagctagaggctaccgaaaataccatcagcgctatggccgctgcggcagccgagcagcaacagttctatttgcttctgggcaacctcttgagtccagataatgtcgttaggaagcaggctgaggaaacgtacgagaatatcccaggccagtcgaagataactttcctcctgcaggccattcgtaatactacagcggcagaggaggctcgacaaatggcggcagtccttcttcgcaggctgttgtag

SEQ ID NO: 30802 - DNA, 3627 bp, synthetic construct
  source 1..3627: mol_type = other DNA; note = Synthetic coding sequence
atggattctctgcccgatgagtttttcgtgcgtcaccccgcagtggaggaccaacggaaggaagaaacggagaacaaattggagaagtccagcgggcagctcaataaacaagaaaacgacatcccaacagatctggtacccgttaatctactgctcgaggtgaagaagttactcaatgctatcaatacactccctaagggggtagtgccccacattaaaaagttcctacaagaggacttttcctttcagaccatgcagagggaggtagctgccaattcccagaacggcgaggagatcgtcccagcactcactctgcgctttctgatcactcagctggaagcagcgctacggaacattcaggcgggaaactacaccgcacatcaaatcaatataggatattatctcactctgctgtttttatacggggtggccctgacagaaagagggaaaaaggaggattataccgaggctgagaataaattccttgtaatgaagatgatgatccaggaaaatgaaatttgcgagaactttatgagccttgtctactttggccgaggcttgctgaggtgtgctcagaagcgctataacggaggccttcttgagttccacaagagtctccaggaaattggggacaaaaatgatcactggttcgacatcgaccctactgaggacgaggatctgcctactacatttaaagatctattgaacaatttcattaaaacaacggagagtaatatcatgaagcagaccatctgttcctatctggattgtgaaaggagctgcgaggctgacatcctaaaaaatacctcctacaaggggttctttcagctaatgtgcagtaagagctgctgcgtgtacttccacaagatctgttggaagaagtttaaaaatttgaagtaccccggagagaatgaccaaagtttttcagggaagaagtgtctgaaagaagggtgcactggggacatggtgcgtatgctgcagtgcgacgtacctggcattgtgaagatcctttttgaagtggtacgaaaggatgaatacattactattgagaacctaggcgcttcctaccgaaagttaatttccctgaaaattaccgatactgacattcggcctaaaatttcactgaaatttaacactaaagacgagatgcctattttcaagttggactacaactatttttaccaccttctccacatcattataatttcaggcaccgacattgtgaggcaaatcttcgatgaagccatgcctccacccctattgaagaaagaactgttaatacacaagaatgttctggaatcctactacaaccacctctggaccaaccaccctttgggcggtagctggcacttattgtacccgccaaacaaagaacttccacaatctaagcagttcgacctgtgcctgttgcttgctctcatcaagcacttaaatgtctttcctgcaccaaagaaggggtggaacatggaacctccgtctagcgatatatccaagtcggcagatatcctgcggctgtgtaaatatcgggacattttgctgtcagagattctcatgaacggcctcacggagtctcaatttaatagtatatggaagaaggtcagtgacatcctcttgcgcctcgggatgatgcaggaggatattgataaagtgaaggagaacccaatcgaaaatatttctcttgactaccatcagctgtctgtgtaccttggaatccccgttccggagatcatccagagaatgctatcctgctatcagcaagggatcgctctccagtccattaccgggtctcaaaggattgaaattgaagagcttcaaaatgaggaagaggaattgagcccaccgctgatggagtataatattaacgtaaagagccaccctgaaatacagtttgccgaaattaataaggatggcacctcaatcccgtcagagtcctccacggagagcctcaaagacttgcaggaggtcaaaagcaaacagcggaagaagaaaaagacaaagaacaagaaaaataaggactccaaggaggaccaggtaccttacgtggtggaaaaggaagagcaactgagaaaggagcaggccaacccgcactcagtgtctcggctcattaaagacgacgcatccgatgttcaggaggattctgccatggaggataagttctacagtctcgacgaacttcacattctggatatgattgagcagggctccgcgggaaaggtgacaacggattacggcgaaaccgagaaggagcgcctagcacgacagcggcagctgtacaagctccattaccagtgtgaggactttaaaagacaactcaggacagttactttccggtggcaagagaaccagatgcagatcaagaaaaaagacaaaatcatcgcgagcctgaaccagcaggttgccttcggtatcaataaagttagcaagctacagagacagatccacgccaaggacaatgaaattaaaaatctcaaggagcagcttagcatgaaacgctcccagtgggagatggaaaagcacaatctggagtccaccatgaaaacctatgtctctaagttgaatgcggaaacatcgcgcgcactgactgcagaggtgtacttcctccagtgccggcgagatttcggtcttcttcatttggagcagactgaaaaagagtgtttgaaccaactcgccagggtaacacatatggcagcctccaatctcgagagtttgcaacttaaagccgctgtcgactcttggaatgccatcgtggcggacgttcgcaataaaattgcattcctgcgtacacagtataacgaacagattaacaaggtgaagcagggatttgccctttccaccctacctcccgttcagctcccccctccccctccaagccctgaaattctaatgcaacaatttctggggcgtccacttgttaaggaaagtttctttcggcctatactgacagtgcctcaaatgcccgctgtgtgtccaggcgtcgtaagcgcaaccggtcagcctagggcacctctgatgaccggtatagcatgggccctcccggcacctgtcggagatgcagttccaccttcggccggtctacggtccgatccatccatcatgaattgggagcgaattactgaccggctgaagacagcttttcctcagcagacaaggaaagaactgacagactttctgcgcaagctgaaggatgcctacggcaaatccctatctgagctgaccttcgatgagatcgtttgcaaaatcagtcagtttatagaccccaagaagtctcagtcacagggtaagagcgtttctaacgtgaactgtgtctcccccagccactcccctagccagccagatgcagctcagcctccgaagcccgcttggaggcctctcacatcccagggccctgctacatgggaaggcgcatccaacccagatgaagaagaggaggaagaggagccctgcgtcatttgtcacgaaaatctcagccccgaaaatctgtctgtgctgccgtgtgcgcacaagtttcacgcacaatgtatacgtccttggttaatgcagcaaggcacctgcccaacttgccggttgcacgtgttgcttcctgaggagtttcccggacaccccagtcggcagttacctaaaatttag

SEQ ID NO: 30803 - DNA, 1743 bp, synthetic construct
  source 1..1743: mol_type = other DNA; note = Synthetic coding sequence
atggttcttgtgggcactcaggatgccatcagtgccgcaaatcctagggtgatcgatgattcccgagcaaggaagcttagcactgatcttaaaaggtgcacgtactatgaaacatgtgctacctacggcttgaacgttgagagggtgtttcaggacgtggcccagaaggtggtcgcactccgcaagaagcaacagttagccatcgggccttgcaaatccctgccgaatagcccctcgcactctgccgtttctgccgctagtattccagccgtccacatcaatcaagccaccaacggcggaggatctgcatttagcgattatagttcttcagttcccagtacaccttctatctcacagcgagagttacgaattgagaccatcgctgcaagctcgacgcctaccccgatccggaagcagtctaagagacggtctaatatcttcactagtagaaaaggagccgacctggatagagagaaaaaagccgctgagtgcaaggtggacagtatcgggtcagggcgagcaatcccgatcaagcagggcattctcctgaagagaagtggcaagtcattgaataaagaatggaagaaaaaatacgtcactctgtgtgataatggcctgttaacttaccatccttcccttcatgattacatgcagaacattcacggtaaggaaattgatttgctgcggacaaccgtgaaggtcccagggaaacgcttgccgagggcaacgccggcaactgccccaggtacaagccccagagctaacggcctctctgttgagagatctaacacccaacttgggggaggcacggaggctgaagagtccttcgagttcgttgtcgtctcgttgactggccagacttggcatttcgaagctagcacggccgaagaacgtgaactgtgggtgcagagtgtccaggcccagattctcgccagtctacaagggtgtcgctcagccaaggataaaacacgcctcggcaatcaaaacgcagccttggccgtgcaggctgtgagaacggtgagagggaatagcttctgtattgattgcgatgcccctaatcctgattgggcttcactgaacctgggcgcattaatgtgcattgagtgctcaggcatacatagacatctgggtgctcatttaagtagagtccgcagtttagatctcgatgactggccccctgagctactcgccgtaatgactgcaatggggaacgccctggctaatagcgtatgggaaggcgcattgggaggatatagcaagccgggacccgatgcatgccgggaggagaaggagaggtggattagagccaaatacgagcagaagcttttcttggcaccactcccatcatcggacgtccctctgggccagcagcttctacgggctgtcgtggaggacgacctgcgacttctggtcatgctgcttgcacacggaagcaaggaagaagtgaacgaaacttacggcgacggcgatggacggaccgctttgcatctgtcaagtgccatggccaacgtagtctttacacagttgttgatctggtatggggtagacgtccgtagcagagatgcacggggactgacaccacttgcctatgccagacgggctggatctcaagagtgcgctgacattttgattcagcatgggtgcccaggcgagggatgcggcctcgcgccaaccccaaatcgggagcctgcgaatggcaccaatccaagtgcagaacttcacagatcgccctctctcctgtag

SEQ ID NO: 30804 - DNA, 312 bp, synthetic construct
  source 1..312: mol_type = other DNA; note = Synthetic coding sequence
atggcggaacttatccagaagaagctgcagggcgaagttgagaaatatcagcagctgcagaaagacttatcaaagtctatgagtggacgtcagaagctagaagcccagttgacagagaacaacatagttaaggaggaattggcgctgctagatggctcaaacgttgtgttcaaactgctgggacccgtgctcgtgaagcaagaactaggagaagcccgtgcgacggtggggaaacggctggattacatcacagccgagattttcttgcgtacaatcccagatcctggggatgtcccagactcctttttttag

SEQ ID NO: 30805 - DNA, 453 bp, synthetic construct
  source 1..453: mol_type = other DNA; note = Synthetic coding sequence
atgaccagccgcaagaaggtgctgctgaaggtgattatactgggagacagcggcgtaggaaagacaagtcttatgaaccagtatgtcaacaagaaattcagcaaccagtataaggccacgatcggagcagactttctcacgaaggaagtgatggtggacgaccgcctggtcactatgcagatttgggataccgccggacaggaaaggtttcagagcctcggagtggctttctatcggggagctgactgctgtgtactagtgttcgacgtcacggcccctaatacttttaaaacccttgattcttggcgcgatgagttcctgattcaggcctctccgcgagaccctgagaacttcccttttgtcgtgctgggcaataaaatcgacctggaaaacagacaggtagcaactaagagggctcaagcctggtgttactccaagaacaacattccatag

SEQ ID NO: 30806 - DNA, 540 bp, synthetic construct
  source 1..540: mol_type = other DNA; note = Synthetic coding sequence
atgaccgacttggtagccgtgtgggacgtggctttgtcagacggagtgcacaagattgagtttgaacacggcaccacttcaggcaaaagggtcgtttatgtggatggtaaggaggagattagaaaagagtggatgttcaagctagtcggcaaggaaaccttctacgtcggagccgctaagaccaaggctaccattaacattgatgcaatcagtgggttcgcctacgagtacaccctggaaatcaacggcaaaagtctgaagaagtacatggaagatcgtagcaagaccactaatacatgggtgctgcatatggacggcgagaacttcaggatcgttcttgaaaaagatgccatggacgtttggtgcaacgggaagaaactggaaaccgctggagagtttgtcgatgatgggacagagacccacttttccatcggcaatcacgattgttatatcaaagcagtatcctcagggaaacgaaaggagggaatcatccacactttaatcgtcgacaatcgggaaatcccggaaatcgcctcctag

SEQ ID NO: 30807 - DNA, 171 bp, synthetic construct
  source 1..171: mol_type = other DNA; note = Synthetic coding sequence
atggactctagcattcacttgtcatcactgatctccaggcacgatgatgaggctacacgtacatcaaccagcgaaggacttgaagagggagaagtggaaggagagacccttctgattgtggagtccgaagaccaagctagtgttgatctaagccatgaccagagcggctag

SEQ ID NO: 30808 - DNA, 153 bp, synthetic construct
  source 1..153: mol_type = other DNA; note = Synthetic coding sequence
atgtgcagtaccagcggatgtgacctagaagaaatcccactagatgatgacgacctgaacaccattgagtttaagatcctagcttactatactcgccaccacgtttttaagtccacacctgccctgttcagccccaagctgttgaggacttag

SEQ ID NO: 30809 - DNA, 1203 bp, synthetic construct
  source 1..1203: mol_type = other DNA; note = Synthetic coding sequence
atgaaccctgcaagcgcccctcctcccttgccgcctcccggacagcaagtgattcacgtgacccaggatctggatactgatctggaagcccttttcaacagtgtgatgaatccaaagcctagttcatggcggaaaaagatcctgccagagtctttctttaaggaacccgattctgggtcacatagcaggcagtcctcgacagactcctcaggtgggcatcccggaccaagattggccggaggtgcacagcatgtgagaagtcactctagtcctgcgtccctacagctcggcactggcgctggcgctgcaggatcgccagcacagcagcacgcccacctccgacagcagtcatacgatgtgacagatgagctgcccctccctcctggctgggagatgaccttcactgccaccggacagcgctatttcctcaaccatatcgaaaaaattacaacatggcaggacccgcgaaaggctatgaatcagcccctgaatcacatgaaccttcacccggcagtcagctccacacctgtgcctcagcgatctatggctgtgagccagcccaacttggtgatgaaccaccagcatcagcagcaaatggccccttccacactgtcacaacagaatcaccctacgcagaaccccccagccggtttgatgtctatgcccaacgctttgacgacacaacaacagcaacagcaaaagctgaggttgcagcgaattcaaatggaaagggaacgtattcggatgcggcaggaggagttaatgcgccaggaggcagcactctgccgccagctgccaatggaagcagaaactctggcacccgttcaagccgcagtaaatccaccgaccatgacaccggacatgagaagcatcactaacaattctagtgatccatttctaaacggcggaccgtaccattctcgggagcagtcaacagactccggcctcggactgggatgctactccgttcccacaacccctgaggatttcctctctaatgtcgatgaaatggacactggggagaacgcaggtcaaacacctatgaacatcaatcctcaacagactcgatttccagactttttagattgcctaccaggaactaatgtagacctgggcactttggagtctgaggacctcattcccctgtttaacgacgtcgaatctgccctcaacaaatccgagccctttcttacttggctttag

SEQ ID NO: 30810 - DNA, 513 bp, synthetic construct
  source 1..513: mol_type = other DNA; note = Synthetic coding sequence
atgccacggaagggaacccaaccctccacagctcggcgacgcgaagagggccctcctcccccaagtcctgatggcgcatcttccgatgccgagcctgagccaccatctggcaggaccgagagccctgcaactgccgctgaaacggctagcgaggaactggacaacagaagcctagaagagatccttaactcaattccaccccctcccccacctgccatgacaaatgaggcaggagctccgaggctgatgataacccatatcgttaatcagaatttcaaaagttacgctggagaaaagatcctgggcccatttcacaaaaggttctcctgcataatcggtcctaatgggtccggcaagagcaacgtcatcgatagcatgctgtttgtcttcggctaccgagctcagaagattagatctaaaaaattgagcgtgctaatccacaatagcgatgagcacaaagatatccaaagctgtaccgttgaagtgcatttccagaagattatcgataaatag

SEQ ID NO: 30811 - DNA, 504 bp, synthetic construct
  source 1..504: mol_type = other DNA; note = Synthetic coding sequence
atggagaaggccgtgaacgatggcagtcattcagaggagttattttgccacctaaagactattagcgaaaaggaagacctgcctaggtgtacatccgagtcccacctgagctgccttaagcaggacatcttgaacgaaaaaactgagctcgaggccaccctgaaggaggcagagctagttacccattctgtggagctcctcttgccactgtttaaggacaccatcgaaaaaattaacttcgagaacgccaacctcagtgctctgaatctcaaaatttctgagcagaaggaaattctgatcaaggaactggatacatttaagtccgtcaagctggcccttgagcatcttctgcgtaaaagagactacaaacagacaggggacaatctgagtagcatgctgctggaaaatctgactgacaacgagagtgaaaatacaaatctgaagaaaaaggtctttgaaaaggaggctcacattcaggagctttcctgcctatttcaaagctag

SEQ ID NO: 30812 - DNA, 2376 bp, synthetic construct
  source 1..2376: mol_type = other DNA; note = Synthetic coding sequence
atgagtaaccagcaggaaaaatacgaagcacagaacatagtgaatagcaccgaggaaagcgatgacgctttcgacaccgtgaccatacctgtcccaagcgaggagccccaggaatcggatcagaccgaggagcacgagtctggaatcgagcaatttagcgaatctcacgccatccacgtagaggaacagtctgatcagagttttagctcactcgagccagataatgaacagttaatggaggaagtcatctctccccgacaagtgtcctacacaccccagcaccatgagaagcagtacgcgatgcagcgccctaatgatgatagtctggcattcttggacaagatcaaaagtgttaaagaatcccttcaagagtccgttgaggactctctggcaactgtcaaggtggttctcattccagtgggccaagagatcgtgattccgttcaaggttgatactattcttaagtacctcaaggaccatttcagccatctcctggggattccacattctgtcctgcaaataaggtattccgggaagatcttgaaaaataacgagacgctggttcagcacggggtgaaaccccaagagatcgtccaggtagagatctttagtaccaacccagacctttatcccgtccggagaattgacggcctgaccgacgtgtctcaaatcattaccgtcaccgttcagaccggccttgaccaataccaacaggtacctgtcgagatcgtaaagagtgatttccacaagccattcctcggtggatttcgacacaaagtgactggggtggagtatcacaacgctggcactcaaactgtgcctaaaaggataccagagcgcctctccattttttgccgggatactcagaccgtcttccagaagaaaaatctgcaacaaaccactaacactacaagcacccagatgacgaacatcggagtttatgtgtccaacatgaccgataaactggtgacaccgggtaaatattttagtgctgccgagtatcacgcgcaaagactaaaagctgtgatcgtgattcaaacctattataggcagtggcatgcaaaaatctttgtggaaaatctccggaggcagaaatctttgcgcctggaatgggagactcagcaggaactcaggaaaatccgtgagaaagaggaatggatcaagctcgattaccacagacggcataatcctaagaccaatgaagacttcgaattcctttacaatgcactggagttctggcgccaagaggaactgacgaggataaatcagtccttcactggcgcagagcgtaaggccgctttgtgcgagctgctggaaaaagagacccagattatcgccagcataggtcggcaccgttatattgcttacatggctaaccaagaggccgcaattcaggcatttctggacaagtgttccgccccaaagatctggagaacgccaaacgggaaaactatcgaaatggacacccagtttaccatacgtgccagagaactacagaacatttacaagtgcattatgctgaaaaatattagccaagacgaacgccttgacgtgctgctgacgctgaaacatacagtcaaggaacacgagtgcaaactcactcaagagattctggagctgatcgacagagaagtggatctcatgatgcggggtgtcaagcatcacaacctggaaggactgcgtaagcggatcgccacgctattctttcactatatcaaaacaccactcttcaaccctgaggtcgctaagtacctgaaggtaccccaggaccccctcaagttctacaagaaaatctatttctgtcactcctgtcaattgtacctcccatctaccgagtttagcgtgtctagcacctcacggcgaatctatcgttgtcgcaactgtatcaacttacagaacgaagcccaaaaaagagaaagctttttgaagtataagtgcctgctacagcagttgtactacaccgaggccgattatgaggacgattcgaagattgcattcctgatgcaactacaagatatccagtatctcactgaaaatatatgggcgtcccagtctgtgctatccgcctgcgacaatctgagtgacctggtgatggtccgttggaataaatctctggagtggtccccttggaactgtattctgctgaccaaagatgaggctgctgctcaccttaagttaacttctattgaagaggggtatgaaagaagttttatccataagattaagcacaaacacatcctcgccaaaaactacttctcacaggttcctgtactggcctcatttattttggatgatggggagatcgatgagatcaggtggaagtaccactcggatacaacccctaaaatcatcgaatctcaacgtccgccacactag

SEQ ID NO: 30813 - DNA, 687 bp, synthetic construct
  source 1..687: mol_type = other DNA; note = Synthetic coding sequence
atgacagaccaaacttactgcgacaggctggtgcaggacactccattcctcacaggccacggaaggttgtccgaacagcaagtggatagaatcatcttgcagctgaacagatactatcctcagatactcaccaacaaagaagctgaaaaattccgtaatcccaaagctagcctgcgtgtgcgtctatgtgacctgttgtcacacctgcagagaagcggggaacgcgactgtcaagagttttatcgagcgctttatatccacgctcagcccttgcattctcgcctgccaagtaggcacgccttgcggaagtttcacattacaaaccacgcttgcctggtgctggcgcgaggtggacatcctagcctgccactgatggcatggatgagctctatgactacacaggtctgttgttctccgggtctggcgtcccccctcgcctcagcacctccccagagaccgcctagcggtcctgagggacgggtatggcaggcccaggccgtgcagatgcttgtgagcgtgtcccatttcctaccgcttcctccctcactgagccatggctcgttccataccgcttggggaattctatacgtgcactcatgtccttcattctccaatctgatacctcgaggatcgctgcacgtctgcgtggatagtaatctggtcccaaccgccgcatggcgctcttag

SEQ ID NO: 30814 - DNA, 948 bp, synthetic construct
  source 1..948: mol_type = other DNA; note = Synthetic coding sequence
atgcccggactaagttgccgcttctatcagcacaaattcccagaggttgaggacgtggtgatggttaatgtccgaagcatagcagagatgggcgcttacgtaagcctgttagagtacaataacatcgagggtatgatcctactaagcgagttatcacgcaggaggattaggtctatcaacaaacttatccgtataggccgaaacgagtgtgtggttgtcatcagagtggacaaagagaagggctatattgacttaagcaagagacgcgtttcacctgaggaagcaatcaagtgcgaggacaagttcacaaaatccaagactgtgtacagtattttgaggcatgtggcggaggtactggagtacactaaggatgagcaattagaaagcctttttcagaggaccgcttgggtttttgacgataagtataaaagaccagggtacggagcttacgacgcttttaagcacgccgtttctgatccgagcatcctcgacagtctcgatttaaacgaagatgaaagggaggtgcttatcaataatataaatagacgtctgaccccccaggcagtgaagattagggctgatatcgaggtagcttgctatggatacgagggtattgatgccgtgaaagaagcgcttcgagccggattgaattgttcaaccgaaaacatgcctatcaagattaacttaattgccccaccacggtatgtcatgaccaccacaaccctggagcggaccgagggcttatcagtccttagccaagccatggccgtaataaaagagaagattgaggagaagagaggtgtcttcaatgtccagatggaaccaaaagtggtaaccgacacggatgaaaccgagcttgccagacaaatggaacgactcgagagagagaacgcggaggttgatggggacgacgatgctgaggaaatggaggcaaaggccgaggactag

SEQ ID NO: 30815 - DNA, 1203 bp, synthetic construct
  source 1..1203: mol_type = other DNA; note = Synthetic coding sequence
atgaaccccgcttctgcccctccacccctaccccctcccggtcagcaagtgattcacgtaacccaggacttggatactgatctcgaagctttatttaacagtgttatgaatccgaagccttccagctggagaaagaagatactcccagagtcattttttaaggaaccagactcaggctctcactctaggcagagctctaccgatagctctggtgggcaccccggacccaggttggccggaggcgcacaacatgttcggtcacactcgtctcctgcatctctacagttggggactggagctggcgctgcgggttcccctgcacaacaacacgcacaccttagacagcaatcttacgacgtcaccgatgaacttcctctgccccctggctgggagatgacgttcaccgcaactggccagcggtatttcctgaaccatattgagaagatcactacctggcaggatccgcgtaaggctatgaatcaacccttaaatcacatgaacctccatccggctgtgtcttccacccctgtgccacagcggtcgatggctgtaagccaacctaacctggtgatgaatcaccagcatcagcagcagatggcaccctcaactctgagccagcagaatcaccccacccagaaccccccagctggcttaatgagcatgcccaatgcactgaccacccagcaacaacagcagcaaaagctgaggctgcagcggattcaaatggaacgggaaaggatccgaatgcggcaggaagagctcatgcgccaagaagctgcactctgcagacagctgccgatggaagccgagaccttggccccagtccaagcagcagtgaacccccctactatgacccccgacatgagaagcatcaccaataacagctctgatccattcctgaacgggggaccctatcactctcgggagcagtccactgacagcggactcggactgggttgctacagtgttccaactactcctgaggattttctgtctaatgtggacgaaatggatacaggggaaaacgctggtcagacacccatgaacattaacccccaacagacacgctttccagatttcctggactgtttgcctggtaccaacgtcgacttaggcaccctagaatcagaggatctgattcctctgtttaatgacgtggaatccgccctcaataaatccgagcccttcctcacttggctgtag

SEQ ID NO: 30816 - DNA, 381 bp, synthetic construct
  source 1..381: mol_type = other DNA; note = Synthetic coding sequence
atggttctgatcttgggcaggagattgaaccgcgaggatcttggagtgagagattctccagctaccaagaggaaggttttcgagatggatcccaaatcattgaccgggcatgaatttttcgacttttcatcagggagttcacacgctgagaacatcctccaaatctttaatgaattccgcgacagtcgcttgttcaccgacgttattatctgcgtggagggtaaggaatttccctgccaccgcgctgtactttcggcttgctcttcttattttagggccatgttctgtaacgaccacagggagtcaagggagatgttagtggaaataaatggcattttggcagaggcgatggaatgttttttacagtacgtttatacttag

SEQ ID NO: 30817 - DNA, 312 bp, synthetic construct
  source 1..312: mol_type = other DNA; note = Synthetic coding sequence
atggccgaactgatccagaaaaaactgcagggtgaagtagagaaataccagcaactgcagaaagacctttctaaatcgatgagcggccgacagaagctggaagctcagttaacggaaaacaatattgtcaaagaggagctggcactgttagacggtagcaacgtggtgtttaagctgctgggacctgtactggtgaagcaggagctgggtgaggcacgggctacagtgggtaaacgcctcgactacattacagcagaaattttcctgcgcacgatcccagatcccggtgatgtgccagattcattcttttag

SEQ ID NO: 30818 - DNA, 237 bp, synthetic construct
  source 1..237: mol_type = other DNA; note = Synthetic coding sequence
atggtgctaatcctggggaggcgtctcaatcgtgaagaccttggcgtgcgcgattcaccagcgactaaaaggaaggtgttcgagatggaccccaaaagcctcacgggccacgaattttttgatttcagctcagggtcctctcacgctgagaacatcctgcagatcttcaacgagtttcgcgactccagactctttacagacgttatcatttgcgtcgaaggcaaagagtttccctag

SEQ ID NO: 30819 - DNA, 1320 bp, synthetic construct
  source 1..1320: mol_type = other DNA; note = Synthetic coding sequence
atggcggctaatctgtcccgtaacggcccagccctccaggaggcctatgtgcgcgtggtgactgaaaaaagccccaccgactgggccctgtttacttatgaagggaactccaatgatatcagggtggccggaactggggagggaggcttggaggagatggtcgaagagctgaatagcgggaaggttatgtatgccttttgccgcgtgaaagaccctaattccggcctgcctaagtttgtgttgatcaactggaccggggagggcgtgaatgacgttcggaaaggggcatgcgcatcacatgtgtcaaccatggcgtcattcctgaagggagcccatgtgacaattaacgctcgtgcggaggaggatgttgaacccgaatgtatcatggaaaaggtggccaaagctagtggagcgaactactccttccacaaagagagcggcagatttcaagacgtgggcccacaggcccctgtgggctctgtataccagaagaccaatgccgtgtccgagatcaaacgggtcggcaaggatagtttttgggccaaagcggaaaaggaggaggagaatcgccgtctcgaggaaaagagaagagctgaggaggctcagcgtcagttggaacaagaacgacgcgagcgggagctccgtgaggcagcgaggagggagcagagataccaagagcagggcggagaggcttccccacaatctcgtacctgggagcagcaacaggaagtggtttccagaaatagaaacgaacagggaagcacctgtgcaagtctccaggagtcagcggtgcatccacgcgagattttcaagcaaaaggagcgcgctatgtctaccactagtatctcatccccacagcctggcaagttaaggtcccctttcctgcagaaacagcttactcagcctgagacacatttcggtagggaaccggctgctgccattagccgccctcgagccgatctcccagcagaagaacccgctccttctacacctccatgcctggtacaggcagaggaggaggccgtttacgaagaaccacctgaacaggagaccttttacgaacagccacctctagtgcagcagcaaggcgcaggcagcgaacacatcgaccaccacatacagggtcaaggcctatcaggtcagggtttgtgcgccagagcactgtacgactatcaagcagctgatgacactgagatttcattcgaccctgaaaacctgattacaggaattgaggtgatcgatgaaggatggtggagaggctatggaccagatggacattttggcatgtttcccgctaattacgttgagctgatagaatag

SEQ ID NO: 30820 - DNA, 219 bp, synthetic construct
  source 1..219: mol_type = other DNA; note = Synthetic coding sequence
atgagctaccaacagcaacaatgtaagcagccttgccagccaccacccgtttgtcccgctcctaaatgtcctgagccctgtccaccgccaaaatgtcctgaaccatgcccaccaagcaaatgccctcagagctgtcctccccagcagtgccagcagaaatgccctcccgtgacgccatcccccccttgtcaaccgaaatgtcctcctaagtctaaatag

SEQ ID NO: 30821 - DNA, 342 bp, synthetic construct
  source 1..342: mol_type = other DNA; note = Synthetic coding sequence
atgtcagccatccagaaccttcacagcttcgatccattcgccgacgcgagtaagggagatgacctgttgccagcaggaactgaagattatattcacattcggattcagcaaagaaatggcaggaagacgctaacaacagtgcagggaatcgcagatgactacgacaaaaagaaactcgtcaaggcttttaagaaaaagtttgcgtgcaacggaacagtcatcgagcatcctgagtacggcgaggtgatccaactgcagggcgatcagagaaagaatatctgccagtttctcgtcgagattggtttagccaaagacgaccagttaaaagtccatggcttttag

SEQ ID NO: 30822 - DNA, 927 bp, synthetic construct
  source 1..927: mol_type = other DNA; note = Synthetic coding sequence
atggcaagtagcaacacagtccttatgagactggtggccagcgcttatagtattgctcagaaagcaggcatgatagtaaggcgcgtgattgctgagggggatttagggatagtggaaaagacttgtgctactgatctacaaactaaggccgacaggctagcccagatgtcaatatgttcttcactcgccaggaagtttccgaaattgaccatcataggcgaggaggatctgccatctgaggaagtcgaccaggagcttatcgaagatagccaatgggaggagattctcaaacagccttgtcctagtcagtatagcgccatcaaggaggaggacctggttgtgtgggtggatccactggatggtaccaaagaatacaccgaggggctgttggacaacgtgactgtccttatcggtattgcttatgaagggaaagccatagccggagtcatcaaccagccatattataactacgaagctggtcctgacgctgtgttaggcaggaccatatggggcgtgctgggactgggtgcctttggattccagctaaaggaagtcccagccggtaagcacattatcacaaccacaagaagtcacagtaataaactggttaccgactgtgtcgctgccatgaatcctgatgctgttctgagagttggaggagcaggcaataagattattcagctaatcgaagggaaagcctccgcctacgtctttgcgtctcctgggtgcaaaaagtgggatacttgtgcccctgaggttattctccatgctgtgggtggcaagttgactgatatacacgggaacgtgctgcaataccacaaggatgtcaagcacatgaactcagccggtgtgctggccacactgagaaactacgattattacgctagccgcgtgccagaatccattaaaaacgcactggtgccttag

SEQ ID NO: 30823 - DNA, 1809 bp, synthetic construct
  source 1..1809: mol_type = other DNA; note = Synthetic coding sequence
atgatcgaaaaaatgcagggatcaagaatggatgaacagcgctgttccttccccccacccctcaagactgaggaagactacataccttacccttcggtgcacgaggttcttggccgtgaggggcctttcccccttattcttctaccacagttcggaggctactggatagagggcactaaccatgaaattaccagcattccagagacggaacctctccagtctcccaccactaaggtcaagcttgagtgtaatcctactgccaggatttaccggaagcacttccttggcaaggaacacttcaactactactcactagatgctgccttgggccacctggttttttctttgaagtatgacgttattggcgatcaagagcatttgagactcctgctcaggacaaaatgtcggacctaccatgacgtgatacccatttcatgccttacggagttccccaatgtggtgcagatggccaaacttgtctgcgaggacgtgaacgtggacaggttttaccccgtactctaccctaaagctagtaggctcatagttaccttcgatgagcacgtgatttccaataactttaaatttggcgtaatatatcagaaactggggcagacatccgaggaagagctcttttcaacaaatgaagaatcacctgccttcgttgagttcctggaatttcttgggcagaaagtcaagctgcaagattttaagggctttcgtggaggtctggatgtaacccatgggcagacaggaacagagtcagtgtattgcaacttccggaataaagagatcatgtttcacgtgagcaccaagctgccatatacggaaggcgacgcacagcagctgcagcgaaagcggcacatcgggaacgacattgtcgcggtcgtgttccaggacgagaacaccccattcgttcccgacatgattgccagcaatttcctacacgcttacgtggtggtgcaggccgagggcggtgggccagacggaccgctctacaaggtgtctgtaaccgcgagggacgacgtaccttttttcggaccaccgttacctgatccagccgtgttccgaaaaggaccggaattccaggaattcttactcacgaagctcatcaatgcggaatatgcctgctataaagccgaaaaattcgcaaaattggaggagaggacccgcgctgcactgctggaaacactgtacgaagaactgcatattcatagccagtcaatgatggggttgggtggagacgaggacaaaatggaaaatgggagcggaggagggggattcttcgagtccttcaagagggtgataaggtccaggtctcaatcaatggatgccatgggcctcagcaacaagaaaccaaacacagtcagtaccagtcactcaggctccttcgccccaaataaccctgacctggccaaggcagccggaatctctttgattgtccctggaaagagcccaacccgaaagaagtccggaccctttgggtcacgaaggagctccgccatcggaatagaaaatatccaggaggtccaagagaagagggaatcccctcccgctggccagaagactccagacagcggccatgtgtctcaggagcctaagagcgagaactcttccactcagagctccccagaaatgcctactactaagaaccgcgcagagaccgctgctcagagagccgaagcactgaaagatttctccaggtcctcttcttccgcctcatcatttgcctcggttgtagaagaaactgagggagtggatggggaggacaccgggctccacgtggcaggaggtcaatgtcagcatcattag

SEQ ID NO: 30824 - DNA, 177 bp, synthetic construct
  source 1..177: mol_type = other DNA; note = Synthetic coding sequence
atgggacgggtttgggatctacctggcgtgttaaaagtggaaggctttagagccaccatggcacagcgcctggtacgggtcctccaaatatgtgccggacacgttccaggagtgagcgcattgaatctgttgtccctcctcaggtcgtccgagggcccaagccttgaagatctatag

SEQ ID NO: 30825 - DNA, 2199 bp, synthetic construct
  source 1..2199: mol_type = other DNA; note = Synthetic coding sequence
atgctgccctgtgcagctggagctcgcggtcggggtgccatggtggtgctgagggccggtaagaaaacctttttgcccccattatgtcgggctttcgcctgcagggggtgtcagctggctcctgagagaggcgctgaacggagagataccgccccatcgggggtgtcacgtttttgccctcctcgaaagagttgccatgattggatcggtcctcccgacaagtattctaacttaagacctgtgcatttttacattcccgagaatgagtctcccttggagcagaaattacggaagctgagacaagagacgcaggaatggaatcaacagttttgggccaatcagaacttgacttttagcaaagagaaagaagagttcatccacagcagacttaagacaaaagggcttggcctgcgcacggagtccggacagaaggcaactctgaacgctgaggaaatggctgatttctacaaggaattcctgtctaaaaacttccagaaacacatgtattataaccggatgtacgacaacatgagcaccatggtgtatattaaagaagacaaactcgaaaagttgactcaggacgagattattagtaagacaaagcaggtcattcaaggcctcgaagccctgaaaaacgaacacaatagcattctgcagagccttcttgagacactgaagtgtctgaagaaggacgatgagagtaatttggttgaggaaaaatccaacatgattcgcaaatcgctggaaatgctggagcttggcttatccgaagcgcaagtgatgatggctctgagcaaccatcttaacgccgttgagtccgaaaaacaaaaactcagagcacaggtgcgccgactgtgtcaggagaatcagtggctgagggacgaattagccaacacgcagcagaagctccagaagtctgagcaaagtgtagcccaactggaagaggaaaagaaacacctggagttcatgaatcagctcaaaaaatatgacgacgacataagccctagtgaagacaaggacacagactccaccaaggagccactggacgatctgttccccaacgatgaggatgacccaggacagggaatacagcaacagcattccagcgctgcagccgctgcccaacaaggcggttatgagatcccggcaaggctgcgaacactgcataacttagtgattcaatatgcctcccagggaagatacgaagtggccgtccctctgtgcaagcaggcgctggaggatttggaaaagaccagtggtcatgatcaccccgatgtagccaccatgctaaacatcctggcgcttgtctaccgggaccagaataagtacaaagacgccgcaaacttattgaacgacgctctcgcaatcagggagaaaactttggggaaggaccaccctgccgttgccgcaacactgaataacctagctgttctgtatggaaagcgtggaaagtacaaggaagctgagcccctgtgcaagagggccctggagatacgggagaaggtcctcggcaaagatcaccctgatgttgccaaacagctgaataacctggcactgctgtgtcagaatcagggcaaatacgaagaggtcgaatactattaccagagggcgttggagatataccagactaaactgggaccagacgacccaaacgtggccaagactaagaacaatttggcatcttgctatctgaaacagggtaagttcaagcaagctgagacactttacaaagaaatcctcactagggcccacgaaagagaattcggatcggtcgatgatgagaacaaacccatctggatgcatgccgaagaacgggaggagtgtaaaggaaaacagaaggatgggaccagttttggagaatatggagggtggtacaaagcatgtaaggtagattcccctacagtcacaacgactctaaaaaatctgggtgcactttaccggaggcagggcaaatttgaggcggctgagactctagaggaggctgctatgcgctcccggaagcagggacttgacaatgtacacaagcagcgagtcgcggaagtcttgaatgacccagagaatatggaaaaaagacgctctagagagagtctcaacgtcgatgttgtcaaatacgaatccggacccgatggaggcgaggaagtctcaatgagtgtcgaatggaatggcatgcggaagatgaagctgggtctcgtaaattag

SEQ ID NO: 30826 - DNA, 249 bp, synthetic construct
  source 1..249: mol_type = other DNA; note = Synthetic coding sequence
atgagcgggctggtcttaggacagcgtgatgagcctgccggacatcggctgtcccaggaggaaatcctaggctctacccgcctcgtcagtcaggggctggaagcacttcggtctgaacatcaggccgtgttgcagtctctcagtcagactatcgaatgtctccagcaggggggtcacgaagagggcctggtccacgagaaggccaggcagctgcggcgatccatggagaatatcgaactggggctgtag

SEQ ID NO: 30827 - DNA, 222 bp, synthetic construct
  source 1..222: mol_type = other DNA; note = Synthetic coding sequence
atggtcctgatattaggacgcaggttgaaccgcgaggacctcggggtgcgggatagtccggctaccaaaagaaaagtgtttgaaatggatccaaagagtctgactggccacgaatttttcgatttctcttctgggtcttctcacgcagaaaacattctgcagattttcaatgagtttagggacagtagactatttaccgatgtgataatctgcgttgaatag

SEQ ID NO: 30828 - DNA, 1191 bp, synthetic construct
  source 1..1191: mol_type = other DNA; note = Synthetic coding sequence
atgaactttcaagctggaggagggcagtccccccagcaacagcaatccctggctgccccagggggaggcggtgctgccgcacagcagctcgtgtgcggcggtcagttcgggggtgctgggcctggagctggcggtggaggaggacctagtcagcagcttgcagggggaccaccccaacagtttgccctcagcaacagcgccgcaattcgggctgaaatccaacggttcgaatcagtgcacccgaacatctacgccatatatgacctgatcgagcggattgaggacctagccctgcagaaccagatccgtgagcatgttatcagtatcgaggattcatttgttaacagccaagaatggacgctttctagatctgtccccgagctgaaggttgggatcgtaggtaacctcagttccggaaagtccgccctggtgcaccggtacctcaccggcacatatgttcaggaggagagccctgagggcggacgattcaagaaggagattgtggttgacggacagtcataccttcttctgattcgggacgaaggcggtccacctgagctgcagttcgccgcttgggtggacgcagtggttttcgttttcagtctggaagatgagattagctttcagacggtgtataactactttcttcgactttgctctttccgtaacgcttccgaggtaccaatggtgctcgtgggcacacaggacgccataagtgcagcgaaccccagggtgatcgatgattctagagcgcgaaaactcagtactgatctgaaacggtgcacctattacgagacctgcgctacttacggccttaatgtagagagagtgttccaggatgtggcccagaaagtggtcgcactgcgcaagaaacagcaactagccatcgggccatgcaagagcctgcccaattccccgagccactctgcggtctccgccgcaagcatccctgccgtacatattaaccaagcgacaaatggagggggatcagcctttagcgattatagcagctccgtgcccagcacccccagtatctctcagcgcgagctacgcattgaaaccattgccgctagtagcactcctacaccaattcggaagcagtcaaaaagacggagtaacatttttaccatctgcgccacagtgtcaaacttctcttcaactaagcgacctttccagctgttgccaaattag

SEQ ID NO: 30829 - DNA, 1110 bp, synthetic construct
  source 1..1110: mol_type = other DNA; note = Synthetic coding sequence
atggatagctgtctgatggtgtggcatatgaagcctcagtctagggcataccggtttacagggcacaaggatgctgtaacatgcgtgaatttctctcctagtggccatctgctggccagtggcagcagagacaaaaccgtgagaatttgggtgcccaacgtaaagggtgaatccaccgtgtttcgggcacataccgccaccgtccgctctgtgcacttctgtagtgatggacaaagctttgtgactgccagcgacgacaaaaccgtgaaagtgtgggccacgcatcgacagaaattcctcttcagcctgtctcagcatattaattgggtccggtgcgccaaattctcccccgacggacggctgattgtgtcagcgagcgatgataaaacggtaaagttgtgggataagagttccagagaatgcgttcattcatattgtgagcacggcggattcgtcacctacgtggacttccatccctccggtacctgtatcgcagctgccggtatggacaatactgtgaaagtctgggacgttcgcacgcatcggctgttgcagcactatcagttgcactcggctgccgtcaatggcctgtcatttcatccttctggaaattacctgatcaccgcatcaagtgactcaaccctcaagattctcgatctgatggaaggtagattgctgtataccctgcatgggcaccaaggacccgctaccaccgtcgccttcagtcgtaccggggaatattttgctagcggaggctccgatgagcaggtaatggtttggaaaagcaatttcgatattgttgatcacggcgaggtgaccaaagtcccccgaccacctgcaaccctggcctcttctatgggcaacctccctgaggtcgactttcctgtaccaccagggcgagggagatccgtcgaaagtgtgcagtctcagccacaagaacccgtttccgttccccagacactgacctccacgttagaacacatcgtcggacagctggacgtgttaacacagacagtgtctattctcgagcagcggttgactctgacggaggataagttaaaacagtgtcttgagaatcagcaactcatcatgcaacgcgctaccccttag

SEQ ID NO: 30830 - DNA, 312 bp, synthetic construct
  source 1..312: mol_type = other DNA; note = Synthetic coding sequence
atggccgagcttattcagaagaaattgcaaggggaagtcgaaaaatatcagcagttgcaaaaagaccttagcaagagcatgtccggtcgccagaaactcgaggcccagctgactgagaataatatcgtgaaagaagagttggcactgttggacgggtcaaacgtggtattcaaactcctagggcctgttctggtaaagcaggaactgggggaggcgagggcaactgtgggaaaaagactggactacattaccgccgagattttcttgagaaccatccctgacccgggagacgtgcccgattcattcttctag

SEQ ID NO: 30831 - DNA, 270 bp, synthetic construct
  source 1..270: mol_type = other DNA; note = Synthetic coding sequence
atgagtgaacaaggcgacctgaaccaagcaatcgccgaagagggcggtacagaacaagagacagccacacccgagaacggtatcgtgaagtccgaaagcctggacgaagaagagaagctggagcttcagcggcgactagaggcacagaatcaagagaggaggaagagcaaatcaggagccggaaagggaaagctcacacggtctctggccgtctgcgaggaaagcagcgctaggcctggaggggagtctctgcaggaccagacactgtag

SEQ ID NO: 30832 - DNA, 1140 bp, synthetic construct
  source 1..1140: mol_type = other DNA; note = Synthetic coding sequence
atgtggcaccttgatttcggcttgcataccgggaagacatttcagcctctcccctttattatcgtggtctacccgggagcgggtaggcgttgggggctggtgctttccctggcgagtcaccggaggcgaaccgaggccggagggggtacaggacctacaagtgacacaggctggggttgcatgctcaggtgtggtcagatgatctttgcccaggccctggtgtgccggcatctaggacgagattggaggtggacgcaaagaaagaggcaaccagattcctacttttccgtcttgaatgcctttattgataggaaggattcgtattattccatccaccagatcgcccagatgggagtaggagagggcaaaagcatcgggcagtggtacgggccaaacaccgtggcccaggtgctcaaaaagctagccgtgttcgatacatggagttccctcgcagtgcatatcgcgatggacaacacagtggtgatggaggaaatccgtcgcttgtgccgcacctctgtgccgtgtgccggtgccacagcctttcccgcagattcggatcggcactgtaacggctttcctgctggcgcagaggtgaccaatcgaccctctccctggcgccctttagtcttgttaatccctctaagactgggcttgactgacatcaacgaagcctacgttgaaacgcttaaacactgctttatgatgcctcagagtctgggagtcattgggggaaagcctaattctgctcactactttattggttatgtgggtgaggagttgatttacttggacccccatacaacccagcccgcagttgagcccactgacgggtgttttattccggatgagtcttttcattgtcaacacccaccttgtcggatgagcattgctgaactggaccctagcattgcagttgggtttttctgtaaaaccgaggatgacttcaacgattggtgccagcaagtgaagaaactctccctattgggaggggcattgcctatgtttgagctggttgagttgcagccatctcatctggcctgcccagatgtgttgaacctaagtctggactcttccgatgttgagcgtttagagcgcttcttcgatagcgaagatgaagacttcgagattctatccctgtag

SEQ ID NO: 30833 - DNA, 1683 bp, synthetic construct
  source 1..1683: mol_type = other DNA; note = Synthetic coding sequence
atgagcgagcacagccgcaattcagatcaagaagagcttctcgacgaggaaattaatgaagatgaaatactggccaacctttctgctgaagaattgaaggaactccagtcagaaatggaggtgatggcgcctgacccttctctacccgtcggaatgatccagaaggatcagacagacaagcccccaaccgggaactttaatcacaaaagtctggtggactacatgtattgggaaaaggcctcacgccgtatgcttgaagaagaacgcgtgcccgttacatttgtgaaaagcgaggaaaagacccaggaagaacatgaagaaatcgagaagagaaacaagaatatggcccagtacctcaaagagaaactcaataacgaaatcgtagccaacaaacgcgagtccaaggggagtagtaacattcaggagactgacgaggaggacgaggaggaggaggacgacgacgatgacgacgaaggcgaagacgacggcgaagaatctgaggagactaacagggaggaggaaggcaaggcaaaggagcagattcggaattgcgagaataattgtcaacaagtcactgacaaagccttcaaagagcagcgtgacaggcccgaggcacaggaacaaagcgaaaagaagatttccaagttggatcctaaaaagctcgcattggatacaagtttcctcaaggttagtactcgccctagcggtaaccagactgatttggacgggagcctgcgcagggtgaggaagaatgatcctgatatgaaggagctgaatctcaataatattgagaacatcccaaaggaaatgttgctggactttgtgaatgccatgaagaaaaacaagcacattaagacattcagtctcgccaacgttggcgctgacgagaacgtggcattcgcccttgctaacatgttaagagaaaacaggtcaattactacgctcaatatcgagtcaaatttcataacaggtaaggggatcgttgccatcatgagatgcctccagtttaatgaaacattgactgagcttcgatttcataaccagaggcatatgttaggtcatcatgctgagatggaaattgctcggctcctgaaagcgaataatactctgctgaagatgggctatcattttgaactgcctgggccaaggatggtggttaccaacctcttgacacgcaatcaggataaacagcgccagaagaggcaggaagaacaaaagcagcagcagctgaaggaacaaaagaaactgattgctatgttggaaaatggactcggcctgcccccaggtatgtgggagctgctaggcggacccaaacctgactctaggatgcaagagttctttcagcccccacccccaagaccacccaacccccagaatgttcctttttcccagagatctgagatgatgaagaaacccagtcaagctcccaagtataggacggaccctgactcgttcagagtagtgaagcttaaacggattcagcgaaagagccggatgccagaggcgagagaaccgccagaaaagacaaaccttaaagacgttataaaaaccctgaagcccgtccctcggaaccgaccaccacctctcgtcgagataacgccacgggaccagttactgaatgacatccgccacagttcagtggcatacctgaagcccgttcagttgcctaaggagctggcctag

SEQ ID NO: 30834 - DNA, 330 bp, synthetic construct
  source 1..330: mol_type = other DNA; note = Synthetic coding sequence
atgaacccagcctccgcgcctcctccactgccaccccctgggcagcaggttattcatgtgactcaggatttagacacggatctcgaggcccttttcaactctgtgatgaatcccaagccgtcttcttggaggaagaaaatcctgcccgagagtttctttaaggaacctgatagcggatcccattcacggcagtccagcaccgactctagtgggggtcaccctggcccaagactcgctggcggagctcagcacgtccgctcacattccagtccggcatccctgcaactaggtaccggggcaggggctgccggaagtcctgcccagcaatag

SEQ ID NO: 30835 - DNA, 609 bp, synthetic construct
  source 1..609: mol_type = other DNA; note = Synthetic coding sequence
atgggtagcaggaagaaagaaatagcactgcaggtcaatatatcaacccaagaattgtgggaggagatgctcagctcaaaaggcctgacagtggtcgatgtataccaaggatggtgtggaccatgtaaaccagtggtgtccctgtttcagaagatgaggatagaggtggggcttgacctgttacactttgcacttgctgaggccgacaggttggacgtgctggaaaagtacagaggaaagtgcgaacccacttttctcttctatgctggtggggaattggttgctgtagttaggggagccaacgcccctctgttgcagaagacaatcctggaccagctggaggccgagaagaaggtgctcgccgaaggacgcgagcgaaaagtcattaaggacgaggccctgtccgatgaggatgagtgcgtttcacacggcaaaaataatggggaggatgaggacatggtttccagtgaaagaacttgtacgctggcgataattaaaccagatgccgttgcacacggcaaaacagatgagatcattatgaaaatccaggaggcaggcttcgaaatcctcactaacgaggagcgcaccatgactgaagctgaggtgtag

SEQ ID NO: 30836 - DNA, 195 bp, synthetic construct
  source 1..195: mol_type = other DNA; note = Synthetic coding sequence
atggcacctcagaaagaccggaagcccaaaaggagcacgtggagattcaacttggaccttactcacccggtggaagatggtatatttgattctgggaactttggcacattcccttcagagtatttaggcttcagcagcttggttcttcactttttctgctttaagatcggggcaataagcacaggagaagggtag

SEQ ID NO: 30837 - DNA, 372 bp, synthetic construct
  source 1..372: mol_type = other DNA; note = Synthetic coding sequence
atggagaacctacagactaacttttcgcttgtgcagggctctactaagaaactgaacggtatgggagatgacgggagtcctccagcaaaaaaaatgattaccgatatccacgctaacggtaagaccataaataaggtgcccactgttaaaaaggagcacctcgatgattacggggaggcgccagtggagaccgacggtgagcacgtaaaacgaacctgcaccagcgtgcccgaaaccctgcatttgaatcctagcctgaagcacacccttgcacaatttcacctgtcatcacagagctcacttggcggacctgcggcattctccgccagacactctcaagagtcaatgtcacctaccgtttttctcccctag

SEQ ID NO: 30838 - DNA, 201 bp, synthetic construct
  source 1..201: mol_type = other DNA; note = Synthetic coding sequence
atgaatccatcaatgaaacaaaagcaggaagagataaaagaaaacatcaaaaacagtagcgtgccacgcagaaccttaaagatgatccagcctagcgcctccgggtccctggtagggagggaaaatgaactgtcagctgggctcagcaaaagaaagcatagaaacgatcaccttacgtccacgacctcttcccctgggtag

SEQ ID NO: 30839 - DNA, 1614 bp, synthetic construct
  source 1..1614: mol_type = other DNA; note = Synthetic coding sequence
atggtgcttattctggggagaaggctcaacagagaagacctcggcgtcagggattctccagcaacaaaaaggaaggtctttgagatggatccaaaatctctgacaggccacgagttcttcgactttagcagcggaagcagccacgccgagaatatactgcagatatttaacgagtttcgtgatagccggctgttcaccgacgtaataatctgcgtagagggcaaagagtttccttgccacagagccgtgctgtcggcatgcagttcatacttcagagccatgttttgtaatgaccacagagaatcgcgcgaaatgctggtggaaatcaacggtatcctggctgaggctatggagtgtttcttgcagtacgtttataccgggaaggttaagataacgaccgagaatgtccagtacctgttcgagacctctagcctgtttcagattagtgtcctgagggacgcgtgcgccaagttcctggaagaacaactggacccttgcaactgcctgggcattcaacggttcgccgacactcatagcctgaaaaccctgtttacgaagtgtaaaaactttgcccttcagacttttgaagatgtttcgcagcacgaagaattcctcgagctcgacaaggacgaactcatcgattacatctgttccgacgagttagtgataggaaaagaggagatggtctttgaagctgtgatgcggtgggtgtatcgagctgttgatctgaggcggccactgctgcacgaactcctcacccacgttcgcctgcctctgcttcatcccaactatttcgtgcagactgtggaggttgaccagcttatccagaatagccctgaatgttatcaattactccatgaggcgcgtcgctatcatatccttggaaacgaaatgatgtctccccgaacacgaccaagacggagcaccggctattccgaggtgatcgtcgtcgtcgggggatgtgagcgtgtgggtggcttcaatcttccctatactgagtgctatgaccccgtgaccggtgaatggaagagtctagcaaaactccctgaattcactaagagtgaatatgctgtctgcgccctgaggaatgacatcctagtctccggaggcagaattaatagccgcgacgtctggatatataactctcaactgaatatctggattagagtcgccagtcttaataaaggccgatggcgacataaaatggctgtcctcctggggaaagtgtacgtagtcgggggatacgatgggcagaaccggctctcaagcgtggaatgttatgatagtttctcaaaccgctggaccgaggtcgctccattgaaggaagccgtgagttcacctgccgtcacctcttgtgtcggaaaactttttgtgatagggggaggcccagatgataacacgtgctccgacaaggttcagtcatatgaccctgagaccaacagttggctgctgagggccgctattcctattgccaagcgatgcataacggccgtgagccttaacaacttaatttatgtagcaggtggactcacaaaagcaatttactgctatgaccctgtcgaggattattggatgcacgtgcagaacactttttctagacaggtgatcacctag

SEQ ID NO: 30840 - DNA, 1611 bp, synthetic construct
  source 1..1611: mol_type = other DNA; note = Synthetic coding sequence
atgaggttggaggagctaaagagactgcagaatcccctcgaacaagtgaacgatggcaagtatagtttcgagaacatccagcgagcatggagagagtatctccagcggcaggaaccattgggcaagcggagcccttcaccaccatctgtttcttcagaaaagctgagcagcagtgtctcaatgaacacgttctctgattcttcaacccctgactacagggaagatggtatggacctcggcagtgacgcagggtcaagcagtagttcaagtcgggcttctagtcagtcaaatagtacaaaggtgactccttgtagcgaatgcaaatcaagttcatctcctggtggcagcctcgatcttgtgtctgcactggaggattacgaagagcccttccctgtgtatcaaaaaaaggtcatagacgagtgggctccagaagaggacggggaggaagaagaagaggaggacgagagggaccagcgaggttatcgcgacgatcggagccccgcaagagagcccggagatgtgagcgccaggactaggtccggcggagggggagggcgttcagcaaccacagctatgcctcctccggtgcctaacggcaatctgcaccagcacgacccacaagacctgagacacaacggaaacgtggtagttgcaggacgtccaagctgctcccgcggaccgagacgcgctatccagaaaccccaacccgctggagggcgtcggagtgggagaggtccggcagctggcggactgtgcctgcaaccacctgatggagggacatgcgtccctgaagaacctccagtgccacctatggactgggaggccctggagaaacatcttgctggactgcagttcagggagcaggaagtacgaaatcaggggcaggctagaacaaacagcacaagcgcccagaagaatgaacgggagtccatcagacagaagctggccctgggaagctttttcgatgacgggccaggaatttatacaagctgttcaaagtccggaaagcccagtctgagctctaggctacagtccggaatgaacctgcagatttgctttgtcaacgactccggaagtgacaaggactccgatgcagacgatagcaagaccgagacctcattggatacaccgctgagcccaatgtccaaacagtcttcctcttactctgacagagataccaccgaggaagagtccgagtctctcgatgatatggatttcctcacccggcaaaagaagcttcaggccgaggccaagatggccctggccatggcaaagcccatggctaaaatgcaagtggaagtcgagaaacaaaaccgcaagaagagtcccgtcgccgacttgctaccacatatgcctcacatctccgagtgcctgatgaagcggagtctgaagcccactgacctgagggacatgaccattggtcagctgcaggtgatcgtgaatgacctgcactcccagattgagtctctcaatgaggaactggttcaactcctacttatacgagatgagctacataccgaacaggacgccatgcttgtcgatatcgaagacctgactaggcatgcggagtcccaacagaaacacatggcagaaaaaatgccagctaagtag

SEQ ID NO: 30841 - DNA, 630 bp, synthetic construct
  source 1..630: mol_type = other DNA; note = Synthetic coding sequence
atgagcgaaaacgccgctcctggcctgatctctgaactgaagttggccgttccatggggtcatatagccgctaaagcttggggctcgttacagggaccgccagtcctttgtctacatgggtggctggataacgctagcagcttcgataggctgattcctctcctcccacaagatttctactacgtagcaatggatttcgggggacatgggttaagcagtcattatagtcctggtgttccctactatctccagactttcgtgagcgagatccgaagagtggtcgccgcactgaaatggaaccgcttttccatcctgggtcacagctttgggggagtggtggggggaatgttcttctgcacttttccagagatggtggataagcttatactgctagatactcccttgttcctgctggagtcggacgagatggagaacctcctgacctacaagcgcagggccatcgagcacgtgctgcaagtggaggccagccaggaacccagtcacgtcttctccctcaaacagctgctgcagcgtcttcttaaatccaactcccacctgagcgaggagtgcggagaactgctcctccagcgtgggaccaccaaagttgcaacagggagagagcagcattag

SEQ ID NO: 30842 - DNA, 201 bp, synthetic construct
  source 1..201: mol_type = other DNA; note = Synthetic coding sequence
atgccagaagatcaggtaggcaaattggaagcgacagagaacacaataagcgcaatggccgcagccgctgccgagcagcaacagttttacctgctgctcggcaatctgctgtccccagacaacgtggtccgtaagcaggcagaggaaacatatgagaatattccaggtcaaagtaagattacatttcttttgcaggcctag

SEQ ID NO: 30843 - DNA, 2061 bp, synthetic construct
  source 1..2061: mol_type = other DNA; note = Synthetic coding sequence
atggccatttcacagcatcaattttaccttgatcggaagcagtcaaaagcaaaaatcccgtcagcacgatctttggacgagatcgccatggacctgacggagaccggcactcagagagccagtaagttggtgactctggagaccaagtctcaatttattatggccagcaatggaagcctgatatcttccggatcgcaggactccgaggttagtgaggagcagaaaagggaaaaaatcctggaattaaagaaaaaggaaaaacttttacaggagaaactactcaagaaagtggaggaactcaagaagatctgtttgagggaggctgaattgactggcaaaatgcccaaagagtatcctctgaacattggggagaaaccccctcaagtgcgtcggcgagtcggcacagcctttaaactggacgacaacttgcttccctcagaagaggaccccgcactccaggagctggagagcaatttcctgatccagcaaaagctggtggaggccgctaagaagctggcaaacgagccagacctgtgcaagactgtaaaaaagaagagaaaacaggattacacagatgccatgaagaaactgcaggaaattgagaatgcgattaacgagtacaggatccgctgcggaaagaaaccctcccagaaggctaccgtactgcccgaagacattattcccagcgagtcgagcagcctgagcgacacaacaacatatgatgatccatcagatgcctttacctttccaggccagagaagcagcagtgtcccacatagtcccaggattcttcctccaaagtccctgggtattgaacgtatccattttcgcaaatcgtccattaacgaacaattcgtggataccagacagtccagagagatgctctccacccatagctccccatataaaactttggagaggcgcccacagggcggtcgctcgatgcctactacaccagtcctgactcgcaacgcttactcctccagccatttagagcctgagagtagcagccagcactgccgacaacgatccggttcactggagtctcaatctcatctcttgtccgagatggatagcgacaaaccatttttcagtctcagtaagtcacagagatcatcatcgacggagatactggacgacggaagcagctacactagccagtcttctacagaatactactgcgttactccggtcaccggaccatactacaccacccaaacccttgatacacgtacccggggacggagaaggtcaaagaaacagaatgtcagcacaagtaactcaggttcaatgcccaatttggcacaaaaggatagtctgcgaaacggagtatactccaaatcccaggaacctccatcgagttcgtattatatcgccggatacacaccatacgcagaatgcgatttttactacagtggagggtacgtctatgaaaatgacaccgagggccaatacagcgtaaacccttcttaccgctcctctgcccattatggctatgagcgccagcgcgactactctcggtcgttccacgaggacgaagtggaccgagtacctcataacccctacgcgaccctcaggcttcccaggaaagcggcagctaagtctgagcacatcaccaaaaacattcataaggccctcgttgccgagcacttgagaggatggtatcagagggcatcaggacagaaagatcaggggcacagtccacagacctcttttgactctgaccgcggatcccagcgctgcctggggtttgccggattgcaagttccgtgttcccctagctctcgtgcatcatcttattccagcgtgtcctccacaaacgcttcgggtaactggcgcacccagctgacaataggtctgagtgattacgaaactccagctcatagcagttatacctcttgttacggaaacgtgtataatcctctgcctagtccatctcgtcagtataccgaaatttcccagcttgatggaacagatggtaatcaattagaagacaacttagaatcaagcgagcagagattattttggcatgaggattcgaagcctggcactctggtttag

SEQ ID NO: 30844 - DNA, 219 bp, synthetic construct
  source 1..219: mol_type = other DNA; note = Synthetic coding sequence
atgatggaggagatttctattatggttgcctacgacgcgcacgtcttctcacagctgcatgacgaggacttcctgacatcattggtagctattagcaaacccagatccatggtaccgaccaagaagcttaaaaagtatgagaaggagtaccagacaatgagagaatctcaactgcagcaggaagaccccatggataggtacaaatttgtctacctttag

SEQ ID NO: 30845 - DNA, 1965 bp, synthetic construct
  source 1..1965: mol_type = other DNA; note = Synthetic coding sequence
atggacagtttacctgatgaatttttcgtgaggcacccggctgttgaggaccagagaaaggaggaaacagaaaacaaactggagaagagctccggtcaattgaacaagcaagagaatgacatacccacagacttggtgcccgtcaatcttctgctcgaggtgaagaagttactgaatgccatcaatacgctcccaaaaggcgtggtcccacacatcaaaaaattccttcaagaggatttctctttccaaaccatgcaacgggaggtggccgctaactcacagaacggcgaggagatcgttcccgctctgacgctgagatttctgatcacacagctggaagctgcactgaggaacatacaggccggaaattacacagcccaccagatcaatattgggtactaccttactttactcttcttgtacggcgtcgcgcttactgaacgcggaaaaaaggaggactacacagaagccgagaataagtttcttgttatgaaaatgatgatccaagagaacgagatttgcgagaacttcatgtctcttgtatactttggccgagggttgctcaggtgtgcacaaaaacgctacaatggaggactgctcgagttccacaaatctcttcaggagatcggcgataaaaacgaccactggtttgacatcgaccctaccgaagacgaggaccttcctaccactttcaaggaccttctgaacaacttcattaagactacggaatcaaacataatgaagcagacgatctgtagttacctcgattgtgagaggtcctgtgaagcggacatcctgaagaacacctcatataaggggttctttcagttaatgtgttctaaatcctgttgcgtctacttccacaaaatatgttggaaaaagttcaagaacctgaaatatccaggggaaaatgaccaatcattttcaggcaagaagtgtctgaaggaaggctgtacgggagacatggttagaatgcttcagtgtgatgtgccaggaatcgtaaaaatcctgtttgaggtagtgcgcaaagacgagtacatcactattgagaacctgggagccagttaccgtaagcttatcagtttgaaaataacagataccgacatcaggccgaaaatctccctgaagtttaatactaaggatgagatgcccatctttaagcttgactataattacttttatcatctgctgcacatcatcattatttccggtaccgatatcgttaggcagatctttgatgaggcaatgccgcctccactgttgaaaaaggagcttctgattcataagaatgttcttgaatcgtactacaaccacctgtggaccaaccaccctttgggaggatcgtggcatctgttatacccgccaaataaagagctccctcaaagcaagcagttcgacctttgtttgttgttggcgctgattaagcatctcaacgttttcccagctcctaagaaaggttggaatatggagccaccatcatctgacatctccaagtccgccgacattcttcgtctttgtaagtatcgtgacattcttctgagtgagatcctcatgaacggcctgacggaatcacaatttaattccatctggaagaaagtgtccgacattttattgcgactcggtatgatgcaggaagacatcgataaggtgaaagaaaaccctatcgagaatatttctttagactaccatcagctcagtgtgtatctggggatacctgtacctgagatcattcaacggatgctgagttgctatcagcagggaatcgctttacagtcgataaccggttcgcagaggattgagatcgaagagcttcagaacgaggaagaagagctgtctccaccactgatggagtacaacattaacgtcaagtctcaccccgagattcaattcgcagaaattaataaagatgggaccagcatcccttctgagtcttcgaccgaaagcctgaaggatctccaggagtag

SEQ ID NO: 30846 - DNA, 570 bp, synthetic construct
  source 1..570: mol_type = other DNA; note = Synthetic coding sequence
atgaatccggctagtgctccaccccctctcccgccacccggacagcaggtgatacacgtcactcaagatcttgacaccgacctcgaggcactgttcaattccgtcatgaatcctaagccttccagttggaggaaaaagattctgccagaaagcttctttaaggaaccggactctgggtctcacagccggcagtcctccacagattcatcagggggacatcctggcccaagactggcaggtggcgcacagcatgtaagatcccactcttctcccgcaagcctgcagttgggaactggcgcaggagctgccggtagtcctgctcaacaacatgcccacctgcgccagcagagctatgatgtgacggacgagttgccactccctcccggatgggaaatgaccttcaccgccactgggcaacggtactttctgaatcacattgaaaagatcactacgtggcaagatccccgaaaggcgatgaaccagcctctgaatcatatgaaccttcatccagctgtgtcatccacgcctgtaccacaaaggagcatggctgtaagtcaacctaacctgtag

SEQ ID NO: 30847 - DNA, 849 bp, synthetic construct
  source 1..849: mol_type = other DNA; note = Synthetic coding sequence
atgggtcctctgccgcgaacggtcgagctgttctacgacgttttgagtccttattcatggctaggattcgaaatactttgtaggtatcaaaacatctggaacatcaacctgcagctaagaccaagtctgatcactgggattatgaaagatagcggcaacaagcctcccggactgctgccccgaaaaggcctttatatggctaacgacctgaagctgttaagacatcatctgcagatccctatccacttcccaaaagacttcctgtctgtgatgctcgaaaaagggtccctgtctgctatgcgcttcctcacagccgttaacctcgagcaccctgaaatgctcgaaaaagcttccagggagctctggatgagggtgtggtctcgcgtgagcgttggtctctgggaaagctctggacgcactctagatgatttcttaactttccccaggcacgttttcagagttatgatcctccctccgcctggtgggtcgactgtgctgcctgtgacaccactgagtccgcacaggcttccagccgtgttttcttcttcccagaacgaagacattactgaacctcagagtatcctcgccgctgcggagaaggctggcatgagtgcggaacaggctcagggcttattggagaagatcgcaacaccaaaggtcaaaaaccagctgaaagagaccactgaggctgcatgtaggtacggagccttcgggttacccattacggtggcccacgtggacggacagacccatatgctctttggtagtgacagaatggagctcctggctcatctactcggcgagaagtggatgggccctatcccgccagccgtcaatgcacggttatag

SEQ ID NO: 30848 - DNA, 1221 bp, synthetic construct
  source 1..1221: mol_type = other DNA; note = Synthetic coding sequence
atggaccagttagagaacgccaagatggaacacactaacgcctctttcgatacctttttttgtgaaactcgcgctggcaagcacgtccctcgcgctctcttcgtggatttagagcccacagtcatcgatggtataaggacaggccaacacaggagcctgttccatccagaacagctcctgtctgggaaggaggatgccgcaaacaattacgcacggggtagatattcagtaggaagcgaagtcatcgacctcgtgctcgaacgaacacgtaaattggccgagcagtgtggcggtctgcagggctttctaatctttaggtctttcggcggaggcacaggttcagggttcacatctctgctaatggaacgtcttaccggtgagtactctagaaagacaaaactggagttcagcgtgtacccagcgcctcggatcagcactgccgtggtcgaaccctataactccgtgctcaccacacactctaccaccgaacatacagattgcactttcatggtcgacaatgaggctgtctatgacatatgccaccgcaagcttggggtcgagtgccccagtcacgcctcaattaaccgtttagtggtccaagtggtgagcagtatcactgcatccttacgttttgagggccctctaaacgtggacttgatagagttccagaccaatctggtcccgtaccccaggatacacttccccatgacagcctttgccccaatcgtgagtgcagataaagcttatcacgagcagttctctgtgtctgatatcaccacggcatgtttcgaatcgagtaatcagctggtaaagtgcgatcccaggctaggaaaatatatggcttgctgcctactttataggggggacgttgtgcctaaggaggtaaacgcagccatagcggctaccaaatctagacactctgtgcaatttgtcgactggtgccccaccggatttaaggtgggcattaataatcggcctcccaccgtgatgcccggaggtgacctcgcaaaggtgcatagatccatatgcatgcttagtaatacaaccgcaattgtggaggcttgggcacgacttgatcacaagtttgatttgatgtacgccaagcgggcttttctacattggtatcttagggaggggatggaggaagcggaattcctagaggcacgggaagaccttgctgccttggagcgcgactacgaggaggttgcccagagcttctag

SEQ ID NO: 30849 - DNA, 1860 bp, synthetic construct
  source 1..1860: mol_type = other DNA; note = Synthetic coding sequence
atgtccggccttgtgctcggtcagcgggacgaacctgccggacaccggctgtcacaagaggagatactgggatcaacccggttggtgagccagggcctggaagccctcaggtcggagcatcaagccgtactccagtccctatcacagaccatcgagtgcctgcagcaaggaggacatgaggagggactggttcacgaaaaggccaggcagctgcgacgttctatggagaacatcgagttaggtctgtccgaagctcaggtgatgctggcgcttgcttcacatctctcaacagtggagtcggagaaacagaaactcagagcccaggtgaggcgactttgccaggaaaaccaatggttgcgggacgagctagcgggtacccaacagcgactgcagagaagcgagcaggcagttgcccaactggaggaggagaaaaagcacctggaatttcttggccagctgagacagtatgatgaagacggacatactagtgaggagaaggagggcgacgcaaccaaggactctctggatgacctctttcccaatgaagaggaagaggatcccagcaatgggctgtccagaggacaaggagctactgccgcacaacagggaggctacgaaatacctgctagactgcggactctacacaacttagtcattcagtacgcagcgcagggaagatacgaggttgctgtacccctctgtaaacaggctctggaggatctggaacgcacatctgggagaggacatcctgatgtagcaacgatgctgaatatcctggcactcgtgtacagggatcagaacaagtataaagaggccgcacatttactcaacgatgccctttctatacgcgagtctacattggggccagaccatcctgctgtggcggcaacgctgaacaacctggcagttctctacgggaaacgaggcaagtacaaggaggccgagcccctgtgtcagcgtgcactggagatcagggagaaggtgctcggaacaaatcatcccgacgtcgcgaaacagctgaataatttagccctattatgccagaaccagggtaaatacgaagctgtggagcgctactaccaaagagctttggctatatacgaggggcagctggggccagacaaccccaacgttgccaggactaagaacaatctcgcgagctgttatctgaagcaaggaaagtatgccgaggccgagactctttataaggagattctcacgagagcacacgtccaggaattcggaagcgtcgatgacgatcataaacctatttggatgcatgcggaggagagagaagaaatgagtaagtctagacatcacgaaggcggaactccatatgcagagtacgggggttggtataaagcatgtaaggtctcttcccctacagtgaatacaactctgcggaatcttggcgctctgtaccgaaggcaaggtaaactcgaagcagcggaaactttagaagagtgtgctctccggtcccggaggcaggggacagaccccatttcccaaaccaaagttgccgagttgcttggggaatccgatggtcgcaggaccagtcaggagggaccgggagattccgtcaagtttgaggggggagaggatgcatccgtcgctgtggagtggtccggggacggaagcggcactctgcaaaggtccggttctctcggcaaaattagggacgttctgcgcagaagtagtgaacttcttgtccggaagttgcagggcactgagcccagaccgtcatcctccaatatgaagagagccgcttcccttaattacctgaatcagccctctgccgctcccctgcaagttagccgcggactgtccgcctctacaatggatttatccagttcttcatag

SEQ ID NO: 30850 - DNA, 294 bp, synthetic construct
  source 1..294: mol_type = other DNA; note = Synthetic coding sequence
atgggtaagtcctgcaaggttgtggtgtgcgggcaggcatccgtggggaaaacctctattttggaacaactgctatatggaaaccatgtggttgggtcagaaatgatcgagacacaggaggacatttacgttggctcaatagaaaccgaccgcggagtgcgggaacagattgctgagagtctgttttccgtgtggagttgctctcgcaggcgcctgactaatccacgaactagacgtcgctcccccagctggagcctcgccacctctgtaacttaccgctcatctggcgtgtag

SEQ ID NO: 30851 - DNA, 387 bp, synthetic construct
  source 1..387: mol_type = other DNA; note = Synthetic coding sequence
atgacagacctcgtagccgtttgggacgtagctcttagtgatggagtgcataagatagaattcgaacatggcacaaccagtggcaaacgtgtggtctatgttgatggaaaggaagaaatacgcaaagaatggatgttcaagctcgtgggtaaggagaccttttacgtaggcgctgccaaaacgaaagctacaattaacatagacgctatctctgggtttgcatacgagtatacgctggaaatcaatggtaagagtttgaagaaatatatggaggatcgctctaagactaccaacacgtgggtgttacatatggacggcgagaatttccgcattgtcctggaaaaggatgcaatggatgtgtggtgtaacgggaagaaattagaatag

SEQ ID NO: 30852 - DNA, 879 bp, synthetic construct
  source 1..879: mol_type = other DNA; note = Synthetic coding sequence
atgaccgtgagtaaatttatggctattcagaaggcattgcagcccgattggttccagtgcctaagtgatggggaggtgtcttgcaaggaggccacttccatcaaacgcgtccgaaaaagtgtagatcggagcttgctgtttctcgataactgcctgagactgcaagaagagtctgaggtgcttcagaaatctgtcattatcggtgtcatcgaaggcggtgacgttatggaagaaagactgcgaagtgctagggaaaccgcaaaaaggccagtcggcggttttctgctagatggtttccagggcaatccaaccacacttgaagcgcgtctgcgactgctcagttcagtaacagccgagttacctgaagataagccaagactcattagcggagtcagcagaccagatgaagtgctagagtgtatagaacgcggagtggatctctttgagagctttttcccgtaccaggttactgagcggggatgcgcgttgactttttcctttgactatcagccaaatcctgaagagacccttctccaacagaacggaacacaggaggaaatcaagtgcatggaccaaataaagaaaatcgaaactaccggatgcaaccaggagatcacctctttcgaaatcaatctgaaagaaaaaaaatatcaggaggattttaatcctttggttaggggatgttcgtgctattgttgtaagaaccacaccagagcctacatccaccacctgttggtcaccaacgaactcttagctggcgtattactgatgatgcacaactttgagcattatttcggatttttccactacattcgggaagctcttaagtccgataagttagcacagttaaaggagctgattcatcgccaggccagctag

SEQ ID NO: 30853 - DNA, 600 bp, synthetic construct
  source 1..600: mol_type = other DNA; note = Synthetic coding sequence
atgcgcttccgtttttgcggcgacttggactgccctgattgggtgctggcggaaataagcacccttgccaaaatgtcttccgttaagttgcgcctgctttgttctcaggtactcaaagagctgctgggccagggcatcgactacgaaaaaatcctcaagctgaccgcggatgccaagtttgagtccggtgatgttaaagcgacggtggcagtgctgtcctttattctgtcatccgcagcgaagcactccgtcgacggcgaatctctgtcaagcgaactgcagcagttgggattacccaaagaacatgccgcaagtttgtgcaggtgctatgaagagaagcaaagtccactccagaagcacctgagggtttgttccttaaggatgaaccgtctggccggagtcggctggcgtgttgattacaccctctcctctagtctgctccagtctgtggaggagcccatggtgcacctccgcctagaggtggccgcagcccctggcactccagcacaacctgttgcgatgtccctgagcgcggataagttccaggtgctgctcgccgagctgaagcaagcccaaaccctgatgagttctttagggtag

SEQ ID NO: 30854 - DNA, 354 bp, synthetic construct
  source 1..354: mol_type = other DNA; note = Synthetic coding sequence
atgccagaggatcaggttgggaaattggaagctactgaaaacacaatatccgccatggcagccgcagctgccgaacagcagcagttctatctgctgctcggcaacctactgtcccctgataatgtagtccggaaacaggccgaagaaacctacgaaaatatcccagggcagtcaaagattacctttcttctgcaggctatcagaaacaccactgctgccgaagaagcccgacaaatggcggcagtgctgcttaggagactgctgtcctctgcgtttgatgaggtctaccccgctctgccgagcgacgttcagacagctatcaagagtgagctcctgatgatcatccagatgtag

SEQ ID NO: 30855 - DNA, 888 bp, synthetic construct
  source 1..888: mol_type = other DNA; note = Synthetic coding sequence
taaacaaagttggctaccggcagtaaagacaccacagttatcatctggcaggttgatccagatacgcacctgctaaaattgttgaagacgctggagggacacgcttacggcgtgtcctatatagcctggtcacctgacgacaattacctagttgcttgcggacccgatgattgctcagaactctggctctggaacgtgcaaactggtgagctgcgcactaagatgtctcagtctcacgaagacagcttgacttcagtcgcttggaacccagacgggaagcggttcgttactggcggtcagagggggcaattttaccagtgcgatcttgacggaaacctgctggatagttgggaaggagtaagggttcagtgcttatggtgcttatcagatggaaagactgttctggctagtgatacccaccagcgtatacgcggatacaattttgaggatttgactgacagaaatattgtacaggaagatcaccccataatgagcttcaccatctctaagaacgggcgtttagctttgttaaatgttgctactcaaggcgtacatctgtgggatctccaggatcgcgtgctggtccggaagtatcagggggttacacagggcttctacacaatccactcctgtttcggtggccacaatgaggattttattgcatccggctcagaggaccataaagtttatatctggcataaacgttctgagctgcctatcgctgagctgacggggcacaccagaactgtgaattgcgtcagctggaatccacagattccttctatgatggcctcagcatctgacgatgggacagttcgtatatggggcccagcaccattcatcgaccatcagaacatagaagaagagtgctcgagcatggactcttag

SEQ ID NO: 30856 - DNA, 1053 bp, synthetic construct
  source 1..1053: mol_type = other DNA; note = Synthetic coding sequence
atggcaaggtggattcccaccaagcggcaaaagtatggagtggccatatataattacaatgccagccaggacgtcgaactttctctacagatcggcgacacagtgcatattctcgagatgtatgagggatggtatcggggttataccttgcagaacaagtctaaaaagggaatcttccccgagacttatatccacctcaaagaggccacggtggaggaccttgggcaacatgaaaccgttattcccggagagttgcccctagttcaggaactcactagcacacttagggaatgggcagtgatctggcgtaagctctacgttaataataagctgactctgtttagacagctccagcagatgacatactccctgatagaatggaggagtcagattctgtccgggactctgcctaaggacgaactggctgaattaaaaaaaaaagtgaccgcaaagatcgatcacggcaatcgcatgctcggactggacctggtggtgcgggatgataacgggaacatcctggacccggacgaaacatccacgatcgcacttttcaaggcccacgaggtggcctctaagcgcattgaggagaagatccaagaggagaaatcaatcctgcagaacctggatcttcgtggccaaagcattttttccacaattcatacttacgggctctatgtcaatttcaagaatttcgtgtgtaacattggcgaggatgctgaattgttcatggccttgtatgaccccgatcagtccacatttatctctgagaactacctcataagatggggcagcaacggaatgccaaaggaaatagagaagctcaacaacctacaggccgtgtttacagatctttcctccatggatctcatacgtccacgtgtgtctcttgtgtgtcagattgtgagggtcggtcatatggagttaaaagaagggaagaagcacacgtgcggcctgcgtaggcccttcggagtcgccgttatggatattaccgatattatccacgggaaagttgatgatgaagagaaacagcactttataccgtttcagcagtag

SEQ ID NO: 30857 - DNA, 360 bp, synthetic construct
  source 1..360: mol_type = other DNA; note = Synthetic coding sequence
atgccagaggatcaggttggcaagctggaagctacagaaaacaccatcagtgccatggccgcagccgcagccgagcagcaacaattctacctgctgcttggaaacctgttatcgcccgacaatgtggtgcgaaagcaggcggaggaaacatatgagaatatccccggtcagagcaaaatcacattcctgctgcaggctatccggaataccaccgcagctgaggaggccagacaaatggccgctgtgttactgagaagactgctctctagtgcgtttgatgaggtctacccagctctcccctccgacgtgcagaccgccattaaatcagaactgttgatgatcatccaaatggaaacttag

SEQ ID NO: 30858 - DNA, 279 bp, synthetic construct
  source 1..279: mol_type = other DNA; note = Synthetic coding sequence
atgtctggactggttctaggacagagggacgagccagcgggacaccggctttcacaggaagaaatcctcggatctaccaggctggtttcccaggggctagaagctttgcgctccgaacaccaggctgtgctgcagagcctctcccagacaatcgaatgtctccaacagggaggacacgaagagggtctggtgcacgaaaaggcacgacagctgagaaggagcatggagaatatagagctgggattaagtgaagctcaagtgatgctcgcgctggcctag

SEQ ID NO: 30859 - DNA, 405 bp, synthetic construct
  source 1..405: mol_type = other DNA; note = Synthetic coding sequence
atggtcctgatactagggagacgtctaaatagagaggatttgggagttagagacagtcccgcaacaaaacgaaaagttttcgagatggaccctaagtcactcaccggacacgagttctttgacttttcaagcggatcaagccatgccgagaatatactgcagatctttaacgagttccgagattcccggcttttcaccgatgtaatcatctgcgttgagggtaaggaatttccttgtcaccgcgcagttctgtctgcctgctcatcatacttccgggctatgttctgcaatgaccatagagaatccagggaaatgcttgtggaaattaacgggattctcgctgaagcgatggagtgtttcctccagtatgtatacactgggaaggtgaaaatcaccaccgagtag

SEQ ID NO: 30860 - DNA, 312 bp, synthetic construct
  source 1..312: mol_type = other DNA; note = Synthetic coding sequence
atggcagagctgatccagaagaaattgcagggcgaagtggagaagtaccagcagttacaaaaggacttgtctaaatccatgtcgggccgtcagaaactggaggctcagcttacagagaacaatatcgtgaaggaagagttggccctcctggacggtagtaacgtggtgttcaaactacttggacctgtactcgtgaaacaggaactcggcgaagctcgggctaccgtgggcaaacggctggactacatcacagctgagatctttttgagaacaatccccgaccctggggacgttcctgactcattcttctag

SEQ ID NO: 30861 - DNA, 1923 bp, synthetic construct
  source 1..1923: mol_type = other DNA; note = Synthetic coding sequence
atgggcaggagaagcggcctcctgggattgagacccggtccggaaccagttgctctggagcgtgtgataaataaggtgcacctgaaagcaaatcatgtggtgaagagagatgtcgacgagcatttgcgcatcaagactgtttacgataaatccgtcgaagaacttctgcccgagaaaaagaatctagtgaaaaacaaattattcccacaggctatctcctacctggagaaaaccttccaggttaggcgtccagccggtaccattctcctttcgcgacagtgcgcaaccaaccaatacctcaggaaggagaacgatccgcataggtactgtacaggcgaatgcgcggcacacaccaagtgtgggccagtgattgtgcccgaggaacatctccagcagtgcagagtgtatcggggagggaagtggccccacggagctgtgggagtgccagatcaggaggggatttccgatgctgatttcgtgctgtatgtcggggcactcgctaccgagagatgcagccatgagaatattatcagttacgccgcttactgtcagcaagaggcaaatatggataggccaatcgctggctacgcaaacctgtgtcctaatatgatttcgacacaaccccaggagttcgtcgggatgttgagcactgtcaaacacgaggtgattcacgctctcggtttttcagccggtctcttcgccttctaccacgacaaagacggcaatcccctgacctcaaggtttgccgacggattgccccctttcaattactccctggggctgtatcagtggtccgacaaggtcgtgcggaaggtagaaagattatgggatgtgagggacaataagattgtgaggcacacagtctaccttctagtgacacccagagtcgtcgaagaggccagaaaacactttgactgtccggtccttgaaggaatggaacttgagaaccaaggaggggttggcacagaactgaaccactgggagaaaagactgcttgaaaatgaagcgatgacgggttctcatacacaaaacagggtgctcagcagaataactctagcactcatggaagacaccggatggtataaagccaactactcgatggcagagaagttggattggggcaggggaatgggctgcgatttcgtgagaaagtcctgcaaattttggatagatcaacaacgacagaagcgtcaaatgttatcgccctactgtgatacacttcggtctaatcccctccagctgacatgtagacaagaccagagggctgtggcagtgtgcaatctgcagaagttcccgaagccactgccacaggagtaccaatacttcgacgagttgagcggcatccctgcagaagatcttccgtattacggagggagcgtagagattgcagattattgtcctttcagccaggagttttcttggcacctgtccggtgagtatcagcgcagttccgactgtcgaatcctcgaaaaccagccggaaatctttaagaactacggcgctgagaagtacggccctcactccgtctgtttaatccagaagagtgcctttgtcatggagaaatgcgaacggaagctcagctaccccgactggggctctgggtgttaccaggtgagctgttcccctcagggcctgaaggtttgggtccaggatactagttacttgtgtagccgcgctgggcaggtgctgcccgtttccattcagatgaatgggtggatccatgacggcaatctgttgtgtccttcctgctgggacttctgtgagctgtgtcccccagagacagacccgcctgcaaccaacctgactcgggctctgcccctggacctgtgttcctgcagctcctctctcgtggtaacattgtggctgctcttggggaacctgttcccactgctagctggctttctgttgtgtatctggcactag

SEQ ID NO: 30862 - DNA, 783 bp, synthetic construct
  source 1..783: mol_type = other DNA; note = Synthetic coding sequence
atgaatttggattccgatggaatggacgacataatatctcaggagtcttcactcgatatggaaggcaattacaagaaagcgcagaagaatgagagggagagcatccgacagaagctggcactcggatcatttttcgacgatggtcctggaatctatacctcttgttccaagtccggcaaaccatcgctgtcatccaggctgcagagcggaatgaacctgcagatctgtttcgtaaacgattccggatccgacaaggacagcgatgcggatgactctaaaaccgaaaccagtttggacacgcccctgagccctatgtctaaacagagctctagctattcagacagagacaccactgaagaggagtctgagagccttgatgacatggactttctgacccgtcagaagaagctgcaggcagaagcgaaaatggccctagcgatggcaaaacccatggccaaaatgcaggtggaggtcgagaagcagaatcgcaaaaagagcccagtcgccgacctgttaccccacatgccgcacatcagtgagtgtctcatgaagagatctttgaaacctaccgatcttcgggacatgacaattggtcagctacaggtgatcgtcaacgatcttcactcacaaatcgagagtctcaatgaggagctcgtgcaattactgctgattcgcgatgaactgcatacagagcaggatgccatgctggtcgatattgaagatctgacacggcatgcggagtcccaacaaaaacacatggccgaaaaaatgccggcaaaatag

SEQ ID NO: 30863 - DNA, 633 bp, synthetic construct
  source 1..633: mol_type = other DNA; note = Synthetic coding sequence
atggccgctagcgtggagcaacgtgaggggaccatacaggttcagggccaagccttgtttttcagggaggctcttcctgggtctgggcaggctagatttagcgtgctgctattacatgggatacggttctcttccgaaacttggcagaaccttggcacgttgcacaggctggcacaggccggatacagagctgtggccatcgacctccccggtctggggcacagcaaggaagccgctgcgcctgcccctatcggtgagctcgcaccagggagctttcttgccgctgtagtcgatgccctggagctagggcctcctgtcgtcatctcaccgtccctgtctggtatgtattccctgccgtttctgacagcacctgggtcccaacttcccggttttgttcctgtggcgcctatctgtacggacaaaattaatgctgctaattatgcatccgtgaaaacccctgctttgatcgtctatggagaccaggacccaatgggccagacaagttttgagcacttgaagcaactgccaaaccatagggtgctaattatgaagggtgcaggtcacccctgttaccttgacaagccggaggaatggcatacggggctcctagattttttacaggggttacagtag

SEQ ID NO: 30864 - DNA, 381 bp, synthetic construct
  source 1..381: mol_type = other DNA; note = Synthetic coding sequence
atgaaccagcgatcccacttggggacaacttacctggacacagcaaagggggctgtagaaacttttatgaaacttagggctagggacccagcttcccggggagataggtatatgctagtcacatttgaagagcccccttacgccattaaagccggttggaaagagaatcatgctactttcatgaatgaattgaagaaccttcaggccgaaggactcaccactctgggacagtccctgcgaaccgctttcgacctgcttaatctgaacagactggtaactgggatcgacaattatggtcagggtcgaaatccatttttcctagagcctgccatcattatcaccatcacagatggatccaaattgacgacaaccagcggatag

SEQ ID NO: 30865 - DNA, 1188 bp, synthetic construct
  source 1..1188: mol_type = other DNA; note = Synthetic coding sequence
atggcaaacgaccctctggagggatttcacgaggtaaacttagcttctcccacgtcgcccgatctactgggggtgtatgaatctgggacccaagagcagaccactagcccttccgtgatctacagaccccatccatctgcactttcatcagtacccatccaggctaatgctctggatgtatctgagcttcccacccagccggtgtattcatctccccgaagactgaactgcgctgagatatcatccatttcattccacgtgactgaccctgcaccgtgctcgaccagcggcgtcactgcaggactgactaaactgacaacacgaaaggacaattacaatgcagagagggaattcctgcagggggctactattacagaagcctgtgacggctccgatgatattttcggcctgtcaactgacagccttagccggctgaggtccccttccgtgctggaggttcgtgagaaaggctacgaaagactgaaagaggaattggccaaagcgcagcgagagctcaaactcaaggacgaggaatgtgagcgattgagtaaggtccgggatcagctggggcaggagctggaggagctgactgcaagcctgttcgaggaagcccacaagatggtcagagaggcaaatatcaagcaggctactgctgagaagcagctgaaagaggcccagggaaaaatcgacgttttacaggctgaagtggccgctctgaagaccttggtcctgtcatcatctccgacctcgcctacacaggagcccctgcctggtggcaagacaccattcaagaaaggacatacaagaaataagtccaccagctcagctatgtcaggttcccaccaagacctttccgtgattcagcctatcgtgaaagattgcaaagaagctgatttatctttatataatgaatttcggctgtggaaggacgagccgaccatggacagaacttgtccattcctggataagatttaccaggaggacattttcccatgtctgacattttcgaaaagcgaactcgcttcagcagttctagaagccgttgaaaacaataccctcagtattgagcccgtgggactccagcctatccggttcgtcaaggccagcgcagtggagtgtggcggaccaaaaagtctcctatacgtcacttttctgcataccttcgatacattctccagagactcatag

SEQ ID NO: 30866 - DNA, 786 bp, synthetic construct
  source 1..786: mol_type = other DNA; note = Synthetic coding sequence
atgggctcccggaagaaggaaattgcactgcaggtcaacatctccacccaggaactttgggaggagatgctcagctcgaagggcctgactgttgtcgatgtctaccaagggtggtgcggcccttgtaaaccggtggtgtcactgttccagaagatgcgaatagaagtgggcttggacctgctgcactttgctttaattaaggacgaggccctgagtgacgaagacgaatgtgttagtcatggcaaaaacaatggcgaagacgaggatatggtgtctagtgagcgcacctgcacactggctatcatcaaaccggacgctgtagcgcatggcaaaacagatgagataattatgaagattcaggaggccggtttcgagattcttacaaacgaagagcggactatgaccgaggctgaggtaagactgttttaccaacacaaggctggcgaagaggcatttgaaaaattagtccaccatatgtgttccggtcccagtcatttgctaatcctcaccagaactgagggcttcgaggacgtcgtgactacctggcgcactgtcatgggacccagagatccaaacgttgccaggcgggagcagccagaaagcctgagggcacaatacgggaccgagatgcctttcaacgcagtgcacggcagccgggatcgagaggatgcagaccgagaactcgcactgcttttcccctcgctgaaatttagcgacaaggatacagaagcaccccaaggggagtcctcaacacaacctaggcttaagatcactgatttggattag

SEQ ID NO: 30867 - DNA, 1284 bp, synthetic construct
  source 1..1284: mol_type = other DNA; note = Synthetic coding sequence
atggtgtgctggcaggacctggaggaatcactccggatgaagctgagtctcactaaagtggttaatggatgcaggttgggcaagattaagaacctgggaaagaccggggatcacacgatggacattcctggatgcctactgtacacaaaaactggctctgccccacacttgacccatcataccctgcataatatccacggtgtgccggctatggcacaactcaccctatcttctctggctgagcaccacgaagttcttacagagtataaggaaggggtcggcaagtttatcgggatgcccgagagtctcctgtattgctcactgcatgaccctgtgtctccctgtcccgctggctatgtcacaaacaaaagtgtctccgtgtggtcagttgccggtcgagtggaaatgaccgtttctaaatttatggccatccagaaggccctccagcctgattggtttcaatgtctctcggacggggaggttagctgtaaggaagccacatctatcaaaagggtgagaaagagtgttgacaggtccctgctgtttttggacaactgtcttcgactgcaggaggagagtgaggtattacagaagagcgtgattatcggcgttatcgaagggggagacgtaatggaagagagactacgcagcgctcgggaaaccgcaaagcgaccagtcggtggatttttactcgatggatttcagggaaaccctacaacacttgaagcaagactgaggctcttgtcatccgtgactgccgaactgccagaagacaagccccgtttgatctccggagtatcccggccagacgaggttctcgagtgtatcgagaggggcgtagacctattcgagtcgttcttcccataccaggtaaccgagcgcggttgcgcactcaccttctcctttgattatcagccgaatcccgaagaaactcttctgcagcagaatgggacgcaggaagagatcaaatgtatggaccagatcaagaaaatcgagactactggctgcaaccaggagatcacgagtttcgagataaacctcaaagagaaaaagtatcaggaagatttcaaccctctggtgcggggatgtagctgttactgctgcaaaaaccacacccgcgcttacatccatcatcttctggtgacaaacgaactgctcgctggtgtcctcctgatgatgcacaattttgaacattattttggattcttccactatataagagaggccttgaagagtgacaagctcgcccagctgaaagagttaattcacagacaggcaagttag

SEQ ID NO: 30868 - DNA, 393 bp, synthetic construct
  source 1..393: mol_type = other DNA; note = Synthetic coding sequence
atgaaccaaaggtcgcatcttggaaccacttatctcgacacggcgaagggcgcagtcgaaacattcatgaagctgcgcgctagggacccagcctctagaggcgaccgctacatgctggtcacatttgaagagcccccatacgctatcaaagccggatggaaggagaatcatgcaacatttatgaatgaactcaaaaacttacaggcagagggcctgaccactctcgggcagagcctccggaccgctttcgaccttctgaatctcaatcgactggtcactggaatcgacaattatgggcagggcagaaaccctttctttttagaacctgcgattataatcaccatcaccgacggctccaagcttacaaccacgtctggagtgcaagacgagtag

SEQ ID NO: 30869 - DNA, 417 bp, synthetic construct
  source 1..417: mol_type = other DNA; note = Synthetic coding sequence
atgaatcctgcttccgctcctccaccattgccgccaccaggacagcaggtgatccatgttacgcaagatctggacacagacttggaagcactgttcaattctgttatgaatcctaagccatcatcctggagaaaaaagatcctgcctgaaagttttttcaaggagccggactctgggtctcactctcggcagtcatccaccgattcttctggcggacatccaggccctcgcctcgctgggggtgcacagcatgttaggtcccacagtagcccggctagcctgcaactcggaactggtgctggtgccgctggaagcccagcccagcagcacgcccacctgcgccagcagagctacgatgtgaccgatgaactccctttgccccctggatgggaaatgacatttaccgctactggctag

SEQ ID NO: 30870 - DNA, 1692 bp, synthetic construct
  source 1..1692: mol_type = other DNA; note = Synthetic coding sequence
atgcgactggaagagctcaagaggctccagaatcctcttgagcaagtgaacgacggaaagtattcttttgagaaccaccagctggccatggacgccgagaacaatatagagaaatatccactgaacctgcaaccgctggagagcaaggtcaaaattatccagcgcgcatggcgcgaatacctacagagacaggaaccactgggcaagcgcagcccaagcccaccatcggtttcatcagaaaaattgagctccagcgtcagcatgaacaccttcagcgatagcagtaccccagattatagagaggacgggatggatctcggcagtgacgcaggctcgagctcttccagcagcagagcctcatcacagtccaactctaccaaagtcacaccttgcagtgaatgtaaatccagctcgtcaccagggggaagcctcgatctggtgagcgctctggaagactacgaggaacccttccccgtgtaccaaaagaaagtaatcgacgaatgggccccagaagaagacggtgaggaagaggaggaggaagacgaacgggatcagcgtggatatagggacgaccggtcacccgctagggagcccggagacgtcagtgccagaacacggtccggtgggggaggcggacgatcagccactactgcaatgccccctccggttcctaacggaaatctacaccagcatgaccctcaggatctacgccataacggaaacgtggtggttgcaggtcgaccaagctgcagcagagggcctagaagagccatccagaagccacagcctgccggtgggcgtaggagcggaagaggcccagccgcaggaggcttgtgtctccagcctcccgacggcggaacatgtgtgccagaagagccgcctgtgccccctatggactgggaggcactagagaaacaccttgcgggactgcagttccgcgagcaggaggtgcggaatcagggtcaggcaagaaccaatagtactagcgcgcagaaaaatgaaagggaaagcattcgccaaaaactggctctgggctcgttcttcgatgatggtcccggaatctatacttcctgcagtaagtccgggaagccatcgttgtcctcaagactgcagtctggcatgaatctgcaaatctgcttcgtaaacgattccggctctgacaaggatagcgacgccgacgactccaaaacagagacttcgctcgacacccctttgagtcctatgagcaagcaatcctccagttacagcgaccgggacactaccgaagaggagtcagaatcattagatgatatggatttcctcactaggcagaagaaactgcaagcagaagcgaaaatggcactcgcaatggccaagcctatggccaagatgcaggtcgaagtggagaaacaaaaccgcaaaaagtcacccgtcgccgacctgttgcctcacatgccacatatctccgaatgtctgatgaagcgatcacttaagccaacggatcttagggatatgaccattggccaactccaggttatagtaaacgacctccactctcagatcgaatccttgaacgaggaactcgtgcagctcctgctgattcgcgacgaattgcatacagagcaggacgccatgctagtagacattgaggacctgacgaggcatgcggagtcgcaacagaaacacatggcagagaagatgcccgcaaagtag

SEQ ID NO: 30871 - DNA, 228 bp, synthetic construct
  source 1..228: mol_type = other DNA; note = Synthetic coding sequence
atgcccgaagaccaggtgggtaagttagaggcaacggaaaataccatttctgcaatggccgctgcagctgcagaacagcagcaattttacctccttttgggaaatttactgtcccctgacaacgtcgtgagaaaacaagctgaggagacctatgagaacattcctggccaaagtaaaattacttttctgttgcaggccatcagaaacactacggccgcagaagagtag

SEQ ID NO: 30872 - DNA, 2712 bp, synthetic construct
  source 1..2712: mol_type = other DNA; note = Synthetic coding sequence
atgcccgagcagttcagtgttgctgagttccttgccgttactgccgaagatttaagtagtccagcaggggctgcagctttcgcagcaaagatgcctcgctacaggggtgccgcacttgcacgtgaggaaattctggagggggaccaggccatcctgcagaggatcaaaaaggctgtcagagccattcattcaagcggactagggcacgtggaaaacgaggagcagtaccgcgaggcagtagaatctctagggaacagtcacttatctcaaaacagtcacgagctctccacagggttcttgaatctcgctgtatttacaagagaggtggccgctctatttaagaatttgatccagaacctaaataatattgttagctttcctctggactctctcatgaaggggcagttaagagacggtaggcaagactcgaaaaagcagctggagaaggcttggaaggactacgaggctaaaatggctaagctggaaaaggagcgcgatcgcgctcgggtaactggtggaatccctggcgaggtcgcccaggacatgcagcgtgaacggaggattttccagctccatatgtgtgagtacctgctcaaggcgggagagtcgcagatgaaacaaggcccagattttctgcagtcactgataaaattctttcatgcccagcacaactttttccaggacggctggaaggccgcacagagcttgtttccatttattgagaagctggctgcctcagttcatgccctgcaccaggcgcaggaggatgaacttcagaaactcacccagctgcgcgatagcttgcgcggaactctgcagttggagagccgggaggaacatctaagtaggaaaaactctggatgcggttactccattcaccagcaccaggggaacaagcaatttgggacagagaaagtcggcttcctctacaaaaagagcgacggaataagacgcgtctggcagaaaagaaagtgtggggtgaagtatgggtgcctgaccatctctcactctacaatcaatcggcctcccgtgaagctaaccttgcttacctgtcaggttcggcctaaccctgaggaaaagaaatgtttcgacctcgtgacgcataaccgaacgtatcacttccaggcagaagatgagcacgagtgcgaggcatgggtgtccgtgttgcagaattccaaggacgaagccctcagctctgcctttctgggggagccaagcgctggacctggtagttggggcagcgctgggcacgatggtgaaccccacgacctgacaaagctgctcatagccgaagtgaaatcacgaccagggaactcccagtgttgcgactgtggcgctgccgatccgacctggctctccacgaaccttggggtgttgacctgtatacagtgttcaggcgttcaccgagagttaggagtcagattcagtagaatgcagagtctgacactcgacttattggggccttctgagcttctcctggcactgaatatgggtaatacgtcatttaatgaggtgatggaggcccagctaccatctcatggaggacctaagccttccgctgaaagtgatatgggcacgcgcagggactatattatggccaagtatgtcgaacatcgtttcgctagaaggtgcacacccgagccccaaaggctatggaccgcgatatgtaacagagacctgctgagcgttcttgaggcatttgccaacggacaggattttggtcagccccttccaggccctgatgctcaagccccagaggagctggtgctgcatcttgcagttaaagtagccaatcaagctagcctcccgcttgtggacttcattatccagaatggcggacatctggacgcaaaggccgcagacggcaatactgccctacactatgccgctttatacaaccaacccgactgtttgaagctgttgttgaagggaagggcacttgtggggacagtaaatgaggccggagaaaccgccctggacatcgccagaaagaagcaccacaaagagtgtgaggagttattggaacaggcgcaggctgggacatttgctttccctctgcacgtggattattcttgggtgatcagtacggaaccaggtagtgacagcgaggaggacgaagaagagaagcggtgtctactgaagctgccagcacaggcccattgggcatccggcaggttagatattagtaacaaaacatacgagacagtggcctccttgggcgctgcaaccccccagggcgagagtgaggactgccctccgcctctcccagtcaaaaatagttccagaacactggtacagggctgcgccagacacgcctcaggggaccggtccgaagtatcctcgttgagctccgaggcacccgaaactcccgaatcactcggatctcccgcatcctctagctccctgatgtctcccctggaaccaggggacccgtcccaggcacctccaaatagtgaggagggcctaagagagccaccaggcacttcgagacccagcctgacttctggcaccaccccttctgagatgtacctgcctgttcggttctcaagcgaatctactcgatcctaccggagaggtgcacgaagccctgaagacgggccatcagcccgacagccattgccaagacggaacgtgcctgtcggtattacagaaggagacggatcgagaacagggagtctgccggcaagttcagtccaactgctgcaggactag

SEQ ID NO: 30873 - DNA, 522 bp, synthetic construct
  source 1..522: mol_type = other DNA; note = Synthetic coding sequence
atgccacggaaaggtacacagccgagcacagctaggcgccgtgaggagggcccacctcctccatctccagacggggcttcctccgatgcagagcccgaacccccatcggggcgaaccgaatccccagccactgccgcagaaaccgcaagcgaggagctggacaacaggtctcttgaggagattctgaactccatccctcccccaccccctcctgccatgactaacgaggccggagcccctaggcttatgattactcatattgtgaaccagaactttaagtcttatgccggtgagaagattctgggaccctttcataagcggttcagttgcattatcggacccaatgggtccggcaaaagcaatgtcatcgacagtatgttgtttgtgttcgggtaccgagcccaaaagataagatcaaaaaagcttagtgtcctgatacacaattccgacgagcacaaagacatccagagttgcacagtggaggtgcatttccagaagatcattgataaggagggtgactag

SEQ ID NO: 30874 - DNA, 2262 bp, synthetic construct
  source 1..2262: mol_type = other DNA; note = Synthetic coding sequence
atgtattctcccattatataccaagccctttgcgagcatgtgcaaacccaaatgagtctcatgaacgacctgacaagcaagaatatccctaacggaattccagctgtaccgtgtcacgccccttcgcacagtgagagtcaagcaacgcctcactcttcctacggcctttgcacatcgacacccgtgtggtcacttcaacgtcccccttgcccccctaaggttcatagtgaagtgcaaaccgacggcaatagccagtttgcctcccaaggaaagactgtgtccgcaacttgtacagacgttttaagaaatagctttaataccagccccggagtcccttgcagtctccccaaaacagacatcagtgcgatcccgacactacagcagctggggctagtcaacggcatcctgccccaacaagggattcacaaggagacagacctgctgaaatgcatccagacttatctcagtctcttcagaagccatggcaaggagactcacttagatagtcaaacccaccgcagccctactcagagccaaccagcttttctcgctaccaatgaggaaaagtgcgccagggaacagataagggaggctacgagcgaaaggaaagatcttaacatccatgttagagacactaaaacagtaaaagatgtgcagaaagccaagaatgttaataaaaccgccgagaaggttaggatcattaaatatctgctgggcgagctgaaagctcttgtggcagaacaggaggatagtgagatccagcggctgattactgaaatggaagcatgcatctctgttttacccactgtgagcgggaacactgatatccaagtagaaatcgcgctcgcgatgcaacccctaagatctgagaatgcccagttaagacgacaattgcggattttgaaccagcagctccgcgaacagcagaaaactcagaagccctcaggcgcagtggactgcaacctggagcttttttcacttcaaagcctaaatatgagcctccagaaccagctggaggaatcgcttaaaagccaggagctgctgcagagcaaaaacgaggagctcctaaaagtaattgaaaatcagaaagacgagaataaaaagttctcaagtatcttcaaagataaggaccagacaatactcgaaaacaagcaacaatatgatattgagattactaggatcaagattgagcttgaggaggccttagtgaatgttaaatcatctcaattcaaattggaaacagccgagaaggagaatcaaatcctgggtatcaccctgcggcagagggatgccgaggtgactcgactcagggaactgacgaggacactgcaaacaagcatggctaagctgttgtccgatctgagtgtggacagtgcacggtgtaagccaggtaacaatctgactaagagcttacttaacatacacgacaaacagctgcagcatgatcccgctcctgcccatacctccatcatgagctacttgaacaagcttgagaccaactactcattcacacattcagagccactgtctactataaagaacgaagagaccatcgaaccggataaaacctacgagaacgtgctgtcctccagagggcctcagaattctaatactcgcggtatggaggaagccagcgctcccggaataatttcagctctgagcaagcaggacagcgacgaaggatccgagacgatggctcttatcgaggatgaacataatctagataataccatttatattcccttcgctaggtcaacccctgaaaagaagagccccctgtcgaagcggctctcgccccagccacaaatccgagccgctactacccaactcgtcagtaacagtggactcgcagtgtcaggcaaggaaaacaaactgtgtacacctgttatatgctcaagctcaactaaagaggctgaagacgcacccgaaaagctctctagagcttccgatatgaaagacacccagctgcttaaaaaaataaaagaagccataggcaagatccctgctgctacaaaggaacctgaagagcaaacagcttgccacggaccctcaggatgtttgagcaacagcctgcaggtcaaggggaataccgtctgtgacggcagcgtgttcaccagtgatctcatgagcgactggtccatttcgtcctttagcacctttactagcagggacgagcaggattttcgaaacgggcttgccgcactcgacgctaatattgccaggttgcagaaatcccttaggacaggcttgctggagaaatag

SEQ ID NO: 30875 - DNA, 219 bp, synthetic construct
  source 1..219: mol_type = other DNA; note = Synthetic coding sequence
atgatggaggaaatttccataatggtagcttacgatgcgcatgtgttctcgcagctgcacgatgaggatttcctgacctcactggtagcaatctcaaagcctcggtcaatggtccctactaagaaactgaagaaatacgaaaaagagtatcagacgatgcgagaatcacagttgcagcaggaggaccctatggataggtacaaattcgtgtatttgtag

SEQ ID NO: 30876 - DNA, 588 bp, synthetic construct
  source 1..588: mol_type = other DNA; note = Synthetic coding sequence
atgtggcatatgacccggaattggccactggtggggaaaacttccctgataacgcgttttatgtacgattctttcgataacacctaccaagctacaattggcattgatttcctgagcaaaacgatgtatctcgaggatcgaacagtgagactgcaactttgggacaccgcaggacaagagagatttcgtagtctgattccaagctacatacgcgattccacagtggcagtcgtggtttacgacatcactaacctcaattcattccagcagacatctaaatggatcgatgatgtacggaccgagcgtgggagcgacgtcattatcatgctggttgggaacaaaacagacctggcggataagcgccagatcactatcgaggagggggagcagcgggcaaaggaactgagtgtgatgtttattgagaccagcgccaagacgggctataatgtgaaacagctgttcaggagggtagcctctgctttgccagggatggagaacgtgcaggaaaagagcaaagagggcatgatcgacataaaactggacaaaccccaggagccacctgcaagtgaagggggttgttcgtgctag

SEQ ID NO: 30877 - DNA, 1047 bp, synthetic construct
  source 1..1047: mol_type = other DNA; note = Synthetic coding sequence
atgtcgctaccgaggtttcagcgcgttaactttggcccttatgacaactacatacccgtctcagagctgtccaagaaaagctggaaccagcagcatttcgccctgctctttcctaagccgcagcgtcccggaaccaaacgacgctccaaacccagccagattagagacaatacggtgtcaattatagatgaggagcaactgcggggagatcgcagacagcccttatggatgtataggtcgttgatgcgtatatccgaacgcccatctgtgtacctggccgcaaggcgccagccgcttaaaccaactaggaccgtggaggtcgactccaaagcagcagagatcggcaaaaaaggtgaggataagactacccagaaggataccactgactcggaatctgagttgaagcagggaaagaaagattctaagaagggcaaggatatcgaaaagggtaaagaagagaagctcgacgccaagaaagattcgaaaaaaggcaagaaggatgctgaaaaaggcaaggactcagccacagagagcgaggatgagaagggtggcgcaaaaaaagacaacaagaaggacaaaaaggattctaacaagggcaaagattcagcgaccgagagtgaaggagaaaagggcggaaccgagaaggatagtaagaagggcaagaaggacagcaagaaaggtaaggatagtgcaattgaactccaggctgtcaaagcagacgagaagaaggacgaggatggaaagaaagacgctaataagggggacgaaagtaaggatgccaagaaggacgcaaaagaaatcaaaaaagggaagaaggacaaaaagaaaccgagttcaactgattcggacagtaaggatgatgtcaagaaagaatccaagaaggatgcgacgaaggacgcgaaaaaggtggcgaaaaaggacaccgagaaggagtccgccgactccaagaaagacgccaaaaagaatgcaaaaaaagacgcgaagaaggatgccaagaagaacgccaagaaggacgaaaaaaaagatgctaagaaaaaaggcaagtag

SEQ ID NO: 30878 - DNA, 2862 bp, synthetic construct
  source 1..2862: mol_type = other DNA; note = Synthetic coding sequence
atgaagcggggaattagacgggatccattccgtaaaagaaagctcgggggacgggcaaaaaaagttcgtgaacccaccgcggtgaattccttttacagagaggcttccctgccctctgtatgggccagtcttagacggagggaaatggtacgctcaggcgcaagacccggacaggtgctttcctccggcaggcacacgggaccggctaagctaacgaatgggaagaaagccacctacctccgtaagatccctaggttcaatgctgatagcggctacagcattcattctgattccgagtcccaggctgagacagttcacgggctggatggttgcgcctccctgttgcgggacatattgaggaatgaagactcaggaagcgaaaccgcttatctcgaaaaccgttccaatagcagacctctcgaatcaaagcgctacggttcaaaaaagaaacgtcacgaaaaacacaccatccctctcgtggtgcaaaaggagacaagctcaagtgacaataagaagcagatcccaaatgaggcctccgcacggagtgagagagacacgagcgacctggagcagaactggagtctgcaggaccattaccggatgtacagccctatcatttaccaagctttgtgtgagcacgtccaaactcagatgtctcttatgaacgatctgacctcaaagaacattccaaatggcatccccgctgtgccatgccacgccccatctcattcagagagccaggccaccccccactcctcttacggactgtgtacctccacccccgtgtggtccttgcagagacccccttgccctcctaaagtgcactcagaggtccagaccgatggcaacagtcagttcgcctcccaaggaaaaaccgtgtctgccacatgtacggacgtgttaagaaactcctttaatacttcccctggagtcccctgctccctgcctaagacggacatctctgctatccctaccctccagcagctgggcttggtcaacggtatcttaccgcagcagggaattcataaagagaccgatcttttgaagtgtatccaaacctacctttccctgtttcgcagccatgggaaggaaacacatcttgactcccaaactcatcggagccctacccaatcgcagcccgcttttctggccaccaacgaggaaaagtgtgcgagggagcagataagagaggctacttccgagcgtaaggacctaaacatacatgtgcgagacacaaaaaccgtgaaggatgtgcagaaggccaagaacgtcaataagaccgccgaaaaagtgagaatcatcaagtatctcctgggcgaactgaaagccctggtcgccgaacaagaggactcagaaattcagcggctgataaccgagatggaggcctgcatcagcgtcctgccgactgtttctggaaataccgatattcaggtagaaatagccctagctatgcagcctctcagaagcgagaacgcccagttaaggcggcagcttcgtatcttgaatcaacagctccgcgaacagcagaagactcagaaaccatctggagcagtggattgcaaccttgaactcttcagcttacagtctctgaacatgagtctccagaatcagctagaagagtctctgaagagtcaagagctcctgcagagcaaaaacgaagagctgctgaaggttatcgaaaatcaaaaggacgagaacaaaaaattttccagcatttttaaagataaagatcagactatacttgaaaacaaacaacagtatgatatcgaaatcacaagaatcaagattgagctggaggaggcactggtcaacgtgaagagctcgcagttcaaacttgagactgccgagaaagagaaccaaattcttggcattaccctgaggcagagagacgctgaggtgactaggctcagggagttgactaggacccttcaaacctcaatggccaaactcctgtctgatctgagcgtcgactccgctcggtgcaagccgggaaacaatctgaccaagagcctcctcaatatacacgacaagcaattgcagcatgaccccgctcctgcccacaccagtatcatgagctacctgaacaaactggagacaaactactccttcacgcactcagagcccctcagcaccattaaaaacgaagaaaccatcgaacctgataagacctatgagaacgtactgtcctcaagggggccacagaattcaaacacccgtggaatggaggaagcgagcgctccgggtatcatatctgccctgagcaagcaggattccgatgaggggtctgagaccatggcattaattgaggacgagcataaccttgacaacacaatctacataccctttgcaagatcaacccccgaaaagaagtcaccactcagtaagagactcagtccacagccccagattcgggctgccacaacacagctagtgagcaactctggcctagccgtgagcggcaaggagaacaagctgtgcaccccagtgatttgctcaagcagtacaaaagaagccgaagatgctcctgagaaactctctagagcttccgacatgaaagatactcaactcctgaagaagattaaagaggccattggaaagatccccgctgccacgaaagagcccgaggagcaaactgcgtgccacggcccttcaggctgcttatcaaacagcttgcaggtgaaagggaatactgtatgtgacggtagtgtgttcacatccgacttaatgagtgattggagcatcagttcattttcgaccttcacttccagggacgaacaggactttcgtaacggacttgcagccctcgacgctaacatcgctagactccagaaatccctccggaccgggttacttgagaagtag

SEQ ID NO: 30879 - DNA, 1683 bp, synthetic construct
  source 1..1683: mol_type = other DNA; note = Synthetic coding sequence
atgagtgagcattcaaggaattcagatcaggaagagttactggacgaggagatcaatgaggacgaaattctggccaacttgtccgccgaggaacttaaggagttgcagtccgagatggaggtcatggcccctgacccttcgctgcctgtcggtatgatacaaaaagaccagaccgataagcctccaactgggaattttaaccacaagtctttggttgattacatgtactgggagaaagcatcccgcagaatgctggaagaggagagagtacctgtgaccttcgtgaagtcagaggagaagacccaggaggagcacgaggagatcgagaaaaggaataaaaacatggcccagtatttaaaagaaaagctgaataatgagatcgtggcaaacaagagggagtcgaagggttcgtccaacattcaggaaaccgatgaagaggatgaagaggaagaggatgatgacgatgacgatgagggcgaagacgatggcgaggaaagcgaggagacgaatcgggaagaggaggggaaagccaaagaacaaatcaggaattgcgagaataattgtcagcaggtgactgataaggccttcaaggagcaaagagatagacccgaggctcaagaacaatccgaaaagaagatatcaaagttggatcccaagaagcttgctttggacacctcttttctgaaggtcagtactaggccctctggaaaccagacagatctagatggctctctgaggagggtcagaaaaaacgaccccgatatgaaggagctgaacttgaataacatcgaaaatatccccaaagaaatgctcctggactttgtgaacgcaatgaaaaagaataagcacattaagaccttctctttagccaacgtcggcgcagatgaaaatgtcgccttcgccctcgctaatatgctgagagagaataggtccatcactactctgaatattgaatctaattttataactggcaaagggattgtcgccatcatgcgatgcttgcagtttaacgagacattgacagagctccgattccataatcagagacatatgctgggacatcacgctgagatggaaatcgccagactcctaaaggctaacaacactcttttaaagatggggtaccacttcgaactgccaggacctcggatggtggtgacaaatctcttaaccaggaaccaggacaaacaacgtcagaagaggcaagaggaacaaaagcaacagcagcttaaggaacagaaaaaactgattgccatgttggagaacggccttggactgcccccaggcatgtgggaattgctcggaggtcccaaaccagactcacgtatgcaggagttttttcagccaccaccccctcgcccacccaatccacagaatgtgcctttttcgcagagatcagagatgatgaagaaaccatctcaggcgcctaagtatcgaacagaccccgacagttttcgggtcgttaagctgaaaagaatacaacgaaagtcacgcatgcccgaagctagagagccacctgaaaagactaatttgaaggacgtgatcaagacgttgaaacctgtcccacgcaatagacctccccctctggtcgagatcacgccgagggatcagttactcaatgatattcgccatagctcagtggcatatttgaaacctgtccagttgccaaaggaactagcttag

SEQ ID NO: 30880 - DNA, 153 bp, synthetic construct
  source 1..153: mol_type = other DNA; note = Synthetic coding sequence
atgcctgaggaccaggtagggaagctcgaggcaaccgagaacacgatttctgccatggcagcagctgcggcagagcagcagcagttctatctgcttttaggtaacctgcttagccccgacaatgtggtgcggaagcaggctgaggttacttag

SEQ ID NO: 30881 - DNA, 288 bp, synthetic construct
  source 1..288: mol_type = other DNA; note = Synthetic coding sequence
atggccattggaaaaagattggccactcttcctactaaggagcagaagactcagagactgatctctgagctgtccctcctcaaccacaaactgcctgccagagtgtggctccctaccgccggattcgaccaccatgtggtgagagtgccacatacgcaggccgtcgtgcttaatagcaaggacaaggctccatatctcatatacgtggaggtgctggaatgcgaaaacttcgatactacctctgtgcctgccaggatacccgagaatagaatcaggagcaccagatag

SEQ ID NO: 30882 - DNA, 1260 bp, synthetic construct
  source 1..1260: mol_type = other DNA; note = Synthetic coding sequence
atggcgggaagtggctgcgcatggggagcagagcctccccgatttcttgaggcattcggcagactgtggcaagtgcagtctcgcctagggagcggatctagtgcaagcgtgtaccgggttagatgctgtggcaacccagggtctcccccaggggcactcaagcagttcttacccccagggaccacgggagccgcagcgtcagccgcagaatacggcttcaggaaggagagggctgccctcgagcagcttcagggacacaggaatatagtaacattgtatggtgtttttacgatacacttctccccaaatgtaccatctagatgtctgctcctggaacttctggatgtctctgtttcagagttgctgctctattcaagtcaccaagggtgcagcatgtggatgatacaacactgcgccagagacgtgctggaggccctggcattcttacatcatgaagggtatgtacatgccgatctgaagcccaggaacattctatggagtgcagagaacgaatgcttcaagctgatagatttcggactcagcttcaaagagggaaaccaggacgtgaaatatatccaaacagatggctatagggcccctgaagctgaactgcagaactgcctggcccaagcgggtctgcaatcagataccgagtgcacttcagctgtagacttgtggagccttggcatcattctgctggaaatgttctccggcatgaagctcaaacatacagttagatcccaggagtggaaggcgaattcaagcgctataattgaccacatctttgcctccaaggccgtcgtgaatgccgctatcccagcttaccacctgagggatttaattaagagcatgttacatgacgatcccagccgcaggattccggcagagatggctctgtgctcaccctttttttcgatcccctttgcccctcacatcgaggacctcgtcatgctgccaaccccagtgttgaggctgttgaatgtccttgacgatgattatctggagaatgaggaggagtatgaagacgtagtggaagatgttaaggaagagtgtcagaaatatgggcctgtcgtgtccctcctcgtgccaaaagaaaaccctggcaggggacaggtgttcgtggagtacgctaatgcgggagattccaaagccgctcagaagctgttgactggccgaatgtttgacgggaagttcgtggtggcaacattttatccattatcggcctacaaaagagggtacctctaccagaccctgctttag

SEQ ID NO: 30883 - DNA, 1272 bp, synthetic construct
  source 1..1272: mol_type = other DNA; note = Synthetic coding sequence
atgccccgaaaggggacccagccttccaccgcccgtcggagggaagaaggaccccctccacctagcccagatggggcttcatctgatgcagaaccggaacctccatccggcagaactgagagcccagcaacggcagctgagaccgccagtgaggagctagacaatagatccttggaggaaatcctgaactccatcccacctcctccaccacccgctatgaccaacgaagcaggcgcaccacgcctaatgataactcatattgtcaatcaaaatttcaaaagttacgctggtgagaagatactcggaccctttcacaagcgcttttcatgcatcatcgggcctaacggatcagggaaatccaatgtgatcgactcaatgctctttgtgtttggctatcgcgctcagaagatccgtagcaagaagctctccgtacttatccacaatagtgacgaacacaaagacattcagagctgcactgttgaggtgcacttccagaaaatcattgataaggagggcgacgattacgaggtcattccaaatagcaatttttacgtgtctcggaccgcctgccgcgacaatacgtcagtgtatcatattagcggtaagaagaagacattcaaggacgtgggtaaccttcttagatctcacgggatagaccttgaccataacagattccttatcttacagggggaggtggagcaaattgccatgatgaagcctaagggccaaaccgaacatgatgaaggaatgttggagtatctggaggatattatcgggtgcgggcgtctgaacgagcctataaaggtcctatgcagacgcgttgagatattgaatgaacaccgcggagagaaattaaatcgcgttaagatggtcgaaaaagaaaaagacgcattggaaggagaaaaaaacatcgcaattgagttcttgactctggagaacgagattttccgcaagaagaatcacgtgtgtcagtattatatctacgaactgcaaaaacggatcgctgagatggagacacagaaggagaagatccacgaagataccaaagaaatcaatgagaaaagtaacatcctgagtaacgagatgaaggccaagaataaagacgtgaaagacactgaaaaaaagctgaacaagataactaagttcattgaggagaataaagagaagttcacacaactcgatctcgaagacgtgcaggtgcgagaaaagttaaagcacgccacttccaaggctaaaaagctggagaaacagctgcagaaggataaagagtag

SEQ ID NO: 30884 - DNA, 1113 bp, synthetic construct
  source 1..1113: mol_type = other DNA; note = Synthetic coding sequence
atggaagagggagtcccttgtcccgcacccgcagcaaagctaacacctcctgtaaaaaaatctcaagatatgcatgacgaacgatctaagctcgtgaacgaatacgcttgtagggtgttggagctgctgggcatggggcacagactcttcgtgcccaggcttctggccacatcgaaagaggatctgctgcaggccgacttcgagggagccctgaaatttttccgcgtgcaactcccaaagcggtaccgcgcagaagagaatgccaggcggcttatggagcaggcatgcaacattaaagtgcccactaaaaaactaaaaaaatatgagaaagaataccagacaatgcgggaatcacagctccagcaagaggaccccatggaccgctataaaagagaaaaccgccgactgcaagaggcctccatgagactggagcaggagaatgacgaccttgcccatgagcttgtgaccagcaagattgcgctccgtaatgacctggaccaggccgaggacaaggccgatgtgttaaacaaggagctgctgctgactaaacaacgcctggttgagaccgaagaagagaaaaggaagcaggaggaggagacggctcagctgaaggaggtgttcaggaagcagctcgagaaagccgagtacgaaattaaaaagacaaccgccataatcgccgagtataaacagatttgtagccaactaagtacccggctcgagaagcagcaggctgcgtccaaagaggagctcgaggtggtgaaagggaagatgatggcctgcaaacactgttcggacatttttagtaaggagggagccctgaaactcgcagctaccgggagagaagaccagggtatagagaccgacgacgagaaggactccctgaaaaagcagctaagagaaatggaactggagctcgcacagaccaagctgcaacttgtggaggccaaatgtaagatccaggagctcgaacatcagagaggtgccctgatgaatgaaatccaggccgctaagaacagctggttctccaagaccctgaacagcatcaagaccgcaactgggacacagccgctccaacccgcacctgtcacccagccacccaaggagtccacatag

SEQ ID NO: 30885 - DNA, 2262 bp, synthetic construct
  source 1..2262: mol_type = other DNA; note = Synthetic coding sequence
atgtactcgcctatcatatatcaggctctctgtgaacacgtacaaacacaaatgtccctgatgaacgacctgacctccaagaatatcccaaacggcatcccggctgtgccctgtcatgcccctagccacagcgaaagccaagccaccccccattcatcatatggattgtgcacttctactcctgtatggagtctgcagcgccctccctgccccccaaaggtgcatagtgaagtgcaaactgatggaaacagccagtttgcttcccaggggaagactgtcagcgccacttgtacagacgtgcttagaaatagctttaatacctctcctggagtgccgtgttccctacctaaaaccgacatttctgccattcctacccttcagcagttggggctcgtcaatgggattctacctcagcagggtatccacaaggagacagatctgctgaagtgtattcagacgtacctttccctatttcgctcccatggaaaggagacacatctcgactcgcagactcatcggtcaccaacacagtcccagccggcatttctcgcaacgaatgaggagaaatgcgcaagggagcagatcagggaggccacatcggaaaggaaggatctgaatatccatgtccgggacacgaaaaccgttaaggatgttcaaaaagccaagaatgtgaataaaaccgcagagaaggtccggattatcaagtatctcctcggcgaacttaaagctctggtggccgaacaggaggacagtgagatacagcgtctaatcacagagatggaggcgtgtattagtgtgttgccgaccgtatccggcaacacagatatccaggtcgagatcgctctggccatgcaacccctccgctccgagaacgcccagctccgacggcaactgcgcatattaaatcagcagcttagagaacagcagaagacacagaaaccttctggcgctgttgattgtaatcttgagctgttctctctccagagcttgaacatgtcattacaaaatcagttagaggaatccttaaagtcacaggaactgcttcaatcaaagaatgaggagttactgaaagtcatcgagaatcagaaggacgaaaacaagaaattctcatcgatcttcaaggacaaggaccagactatactagagaataagcagcagtacgatatcgaaatcacccgtattaagattgaactggaagaggccctggttaacgttaagtcttcgcagttcaaacttgagacagctgaaaaagagaatcagattttaggcatcaccttgcgccagcgggacgccgaagtgaccaggttgagggagctgaccaggacactgcagaccagcatggccaagctcttaagtgatctgagcgtcgatagcgcacgctgcaaaccaggtaataatctgacaaaatctctgcttaatattcatgataagcaactgcagcatgaccccgctcccgcacacacatcaataatgagttacctcaataagctcgaaactaattacagtttcacccactccgaacctctgagcacaatcaagaatgaggaaactattgagcctgataaaacttacgaaaatgtgttgtcatctcggggaccacagaatagtaatacccgcggtatggaagaagcatccgcacctggaataatctctgcactgagcaagcaagatagcgatgagggatccgaaaccatggccctgatcgaggatgaacacaatttagacaacaccatttacatcccctttgccagatcaactccagagaaaaaatccccactctcgaagagactgtctcctcagcctcagatcagggcagcaactacacaactggtgtccaacagcggattagctgtctcgggcaaggaaaataagctctgcaccccggtaatttgcagtagctccaccaaggaagccgaagacgcaccagaaaagctcagccgcgcatctgacatgaaggacacccagttgctaaagaaaattaaggaggcaataggaaagattcccgctgcaacaaaagagcccgaggagcagactgcatgccatggaccatcaggttgtttaagcaacagtctgcaagttaagggcaatacagtgtgcgacggttcagtgttcacttcagatctgatgagcgattggtccatcagcagcttctctacatttacctcccgcgatgagcaggactttcgcaatgggctagctgcattggatgctaacatagctagactccagaaatctttaagaactggcctgctggaaaagtag

SEQ ID NO: 30886 - DNA, 2067 bp, synthetic construct
  source 1..2067: mol_type = other DNA; note = Synthetic coding sequence
atgtcagtcaacagtgagaaaagtagttcttcagaaagacctgagcctcaacaaaaggcgccacttgtcccaccgccaccacccccaccccctcccccacctccaccgctccccgatcctactcccccagagcccgaggaagaaatcctgggctctgatgacgaggagcaggaagatcccgctgattactgcaagggaggctatcatcctgtcaaaattggtgatctgtttaacggcaggtatcacgttataagaaagctcggctggggccatttctcgacagtatggttgtgctgggacatgcaggggaaaagattcgtggccatgaaagtggtcaagagtgcccagcactatacagagaccgcactcgacgaaataaagctccttaagtgcgtccgggagagcgatccctccgaccccaataaagatatggtcgtgcaactgattgatgacttcaaaatttccggaatgaacggcatccacgtgtgtatggtcttcgaagtgcttgggcaccacctgctgaagtggatcataaagtctaattatcaaggcctccctgtgagatgcgtgaaatctattattcggcaggtcctccagggacttgactatttgcactctaagtgcaaaattatacataccgacattaaacctgagaatattctgatgtgcgtggatgacgcttatgttcgcagaatggctgcggaggcaacagagtggcagaaggccggagcaccccctccttctgggtcagccgtgtcaaccgctcctcagcagaagccaatcggaaaaatctcaaagaacaagaaaaaaaaattgaagaaaaagcagaagcgacaggctgaattgttagaaaaacgactgcaggagatagaggagctggaaagggaggcagaacgtaagatcatcgaggagaacataacttctgcagctccatccaacgaccaagatggagaatactgtcctgaagtcaaactcaaaacaacaggcctggaggaagccgctgaggccgaaactgctaaagacaacggggaagcagaagaccaagaggaaaaggaggacgcagaaaaggagaacattgaaaaggacgaagatgacgttgatcaagaactagccaatattgatcccacttggatcgagagcccgaaaacaaatgggcacattgaaaatggaccatttagcctcgagcagcagttagacgacgaagatgacgatgaggaggactgccccaatcctgaagagtacaatctcgatgagccgaacgcagaaagcgactatacatactcctcttcctatgagcaattcaacggtgagcttccaaacgggcgacataaaatccctgagtctcaattccctgaattctctacatccctgttctccggttctctcgaaccagttgcatgcggcagcgtgttatccgaagggtctccgctgacggaacaggaagaaagttccccttcgcacgacagaagcaggactgtatccgcatcaagcaccggcgatcttcctaaagccaagacaagggcggctgatttattggttaatcctttggaccctcgaaatgccgataagatccgggtgaagatcgccgatctcggtaacgcatgttgggtgcataagcactttacagaggatatccaaacccggcagtaccggtcaatcgaagtgctgataggcgcagggtacagtacacccgctgacatctggagcaccgcctgtatggcctttgaactggcgacaggcgattatctcttcgagccacatagtggggaggattacagtcgcgatgaagatcatatcgctcatattatcgagctgctgggcagcattccacgacattttgccttgagcggcaagtactccagggaattttttaaccgccgtggagagctccgacacataactaaacttaagccatggtccttgtttgatgtactggtggagaaatatgggtggccccatgaggacgccgctcagtttactgacttcttgattcctatgttggaaatggtgcctgaaaagagagcatcagccggagaatgcctccggcacccctggctgaactcctag

SEQ ID NO: 30887 - DNA, 543 bp, synthetic construct
  source 1..543: mol_type = other DNA; note = Synthetic coding sequence
atgccgaggaagggcacacagcctagtacagcaagacgccgagaggaaggacctccgccaccaagtccagacggagcgtcttcagatgccgagccggaacctccgtctggacgcactgagtcacctgccactgccgcagagaccgcaagcgaggagcttgacaatagaagcctggaagaaatcctgaattccattccaccaccacctcctccagccatgacaaacgaagctggagcacccagactcatgattacacatattgttaaccagaacttcaaatcatatgccggagagaaaatcttgggcccttttcataagcgcttcagctgtatcataggacccaacggttcgggaaaatctaacgttattgattcaatgttattcgtgtttggctacagggcccagaaaattcgaagcaagaaattatcagttttgattcacaattccgatgagcataaagatatccagagctgtacggttgaggtgcattttcagaagattatcgacaaggaaggcgacgattacgaagtgatccccaactag

SEQ ID NO: 30888 - DNA, 4689 bp, synthetic construct
  source 1..4689: mol_type = other DNA; note = Synthetic coding sequence
atgcccggagaggcggcacgcgctgaactgctccttccagaggcagatcgacccggtcctcgcaccgacctgagctgcgacgcagcggctgccaccacgatcttgggaggagataggagagagccctgcgccttgactccgggaccatcacatctggcccttactttcttacctagcaaaccaggagccaggcctcagccagagggagcgagttgggatgccggacccggaggagcgccttccgcctgggccgaccccggtgagggcggtccatcccctatgctcttgccagaggggctgtcaagccaggccctgtccactgaggcaccgctgcccgcaactctggaaccacgcatagtgatgggagaggaaacctgccaggctctcttaagccccagagctgcacggactgccctgcgggaccaggaaggcggtcacgcctcccctgacccacctccagagttgtgtagtcagggagatctgagcgtcccaagcccaccaccagatcctgacagtttcttcacacctccgtctacacccacaaaaacaacctacgccctgctgccggcttgcggaccacacggggacgccagggacagcgaggctgagctgcgcgacgagctcctggacagcccccctgcaagcccatcagggtcttatattaccgctgacggagactcctgggcaagttcccctagctgttccctcagcctgctggcacccgcagagggtttggattttccttcaggatgggggctttctccgcagggatctatggtagacgaacgggagttgcatccggctggaactcctgaaccaccctcaagtgagtctagcttatctgccgatagttcatcctcttggggacaagagggtcatttttttgacctggattttttagcaaatgatcccatgataccggcagccttgcttccttttcaaggatctctgattttccaagtcgaggcagtggaagtgacacccctctcccccgaggaggaggaagaagaggcagttgccgacccagacccaggtggggatcttgctggcgagggggaagaagacagcacgagcgccagcttccttcaatcactctcagacctgtctatcacggagggtatggatgaggcttttgcatttagagacgacacaagcgccgcttctagcgactctgatagcgccagctacgcagaagctgacgacgagcggctgtattccggtgagcctcatgcccaggccacacttctgcaggactcagtgcaaaaaactgaggaggagagtggaggcggagctaagggcctgcaagcccaggatgggacagtctcctgggctgtggaggccgctcctcaaacaagtgaccgtggggcttacctctcacagaggcaggagctgatctccgaggttactgaggaaggcttagcattggggcaggagagtacagcgaccgtcactcctcacactttgcaagtagcaccaggcttacaggttgaagtggccacccgggtcaccccccaagccggagaagaggagactgacagtactgccggtcaggagtccgcagcaatggccatgccacagcccagccaagaaggcatttcggaaatcttgggccaagaatcagtgaccgctgagaagttaccaactcctcaggaagaaacgtctctcaccctgtgccctgactcaccacaaaaccttaaggaggaaggtgggctcgacctcccctctggacggaaacccgtggccgctgcgaccatcgtccccaggcaggcaaaggaagaccttaccctcccccaggactctgccatgactcccccattacccctgcaggacactgacctgtcttctgcgcctaaacctgttgccgctgccactatcgtatcccagcaggccgaggagggtcttactttacctcaagacagcgtgatgactcctccacttccattacaggacacagagctgagctccgcccctaagcccgtggccgcagcaaccttagttagtcaacaggccgaggaaggcctcaccctcccacaggattctgccatgactcccccactcccactgcaggatacggatctaagcagcgctcccaagcctgtggcagctgccaccctggttagccagcaagccgaagagggcctcaccctgccacaggactccgctatgacaccccctctacccctccaggatacagacttgtctagcgctccgaaacctgtggccgctgccactctagtttcccagcaagcagaagaaggactgaccctgccccaagactctgctatgacgcctccactgccactccaggatactgatctgtcctctgctccaaagcccgtggcggcagctaccatcgtgtctcagcaagcagaggaggggctcacactgcctcaggatagtgccatgactccacctctcccactgcaggacacagatctcagttccgccccaaagccagtggccgctgccacaatcgtgtcgcagcaagcagaagagggcctgacactgccccaggacagcgccatgacccctccactcccgctgcaagatactgacctgtccagcgcgccaaagccagtagctgcagctaccccggtctcacagcaggcagaagagggtttgactctgccccaggattctgcgatgaccccccctctgccactccaggataccgatctgagttcggcccctaaacccgtggccgctgcaactcctgtgagccaacaagccgaggagggcctgactttgccgcaggactctgccatgacagcaccactgccactccaggacactgggccaaccagcggaccagaaccgctggctgtagctactccacaaaccctgcaggcagaggccggttgcgctccaggcacagagccagtggccacgatggctcaacaagaagttggcgaggccctgggccctagacccgcacccgaagagaagaacgccgcactgccaactgttcccgagccagctgcacttgatcaggttcagcaagacgacccccagcccgctgctgaagccggtactccatgggctgcccaagaagacgcggactcaacccttggaatggaagcactctcactcccagaacccgcaagcggtgcaggggaggagattgccgaagctctttctcggcctggtagagaggcttgcctggaggcccgtgcccacactggcgacggagcgaagccagactcaccccagaaggagaccctggaagtcgagaaccaacaggagggcggtctaaaacctctggcccaagagcatggacctcgatctgctctcggtggcgctcgggaagtacctgatgcgcctccagccgcatgcccggaggtgagccaggcacggctgcttagccctgcaagagaagagaggggattgtcaggcaaatccacgcccgagccgactcttcctagtgctgtagccaccgaagccagtctggactcttgccctgagtcctccgtaggtgccgtttcctctctagatagggggtgtccagatgcacccgctcccacctctgctccaacctcccagcaaccggaacctgtactaggcttaggctcggtggagcagcctcacgaggtgcccagtgtgctggggacccccttgctgcagcctccagagaacctagcgaaggggcagccttccacgcccgtggatcgccctctgggcccagacccctccgcccctggcacccttgcaggcgctgcgcttccaccactagaaccccctgccccttgcctgtgtcaggacccccaagaggattcagtagaagacgaagagccccctgggtcactgggcctgcccccaccacaggctggagtccagcccgcagcagccgcagtgtccggtaccactcagccactggggactgggcctcgcgtctccctaagcccacactccccgctcctgtcaccaaaggtagcttccatggacgccaaggatctagcccttcaaattttacccccttgtcaggtaccaccacctagcggtccccagtccccagcagggcctcaagggctgtccgctcctgagcaacaggaagacgaagactctcttgaagaggacagtccaagagccctggggtccggccagcacagcgacagccacggcgaaagcagcgccgaattggacgaacaggacatactggcccctcagacagtgcagtgtccggctcaggctcccgcaggaggttccgaagagaccattgcaaaggccaagcagagccgctctgagaaaaaggcgaggaaggccatgagtaagctgggcctgcgtcagatacaaggcgtcactaggattacaattcagaaatccaagaatatcctcttcgtgatagccaagccagacgttttcaagagccccgcttcggacacgtacgtagtcttcggtgaggctaaaatcgaggacctatcacagcaggttcacaaggctgccgctgaaaagttcaaggtgcccagcgaaccgtctgctctcgtaccagagtccgcgcctagacctagggtgcgcctcgagtgcaaggaagaggaagaggaggaggaagaagaggtcgacgaggcaggcctggagctgagggatattgaactcgtgatggcacaggctaatgtctcaagggctaaagcggtacgagccctgcgggacaaccactcagacatcgtgaacgctattatggagctgactatgtag

SEQ ID NO: 30889 - DNA, 3294 bp, synthetic construct
  source 1..3294: mol_type = other DNA; note = Synthetic coding sequence
atggcagcggcagcggctgaacaacagcagttctatctgctgctgggaaacctgctctctcctgacaacgtcgtacgaaaacaagcagaggaaacatacgaaaatattcccggtcaaagcaaaatcacttttttgctgcaagccatccgcaacaccaccgccgctgaggaagctagacaaatggccgctgtactcttgcgtagacttctttcctccgcattcgacgaagtttacccagctttgccttctgacgtacagaccgccattaaaagcgaacttctgatgattatacagatggaaacgcagtcaagtatgcgcaagaaggtgtgcgatattgccgctgagctagcgagaaatttgattgacgaagacggtaacaaccagtggcctgaagggctgaaattcctgttcgatagcgtgagcagtcagaacgtggggctcagggaagcagcactgcacatcttttggaatttccctggcatctttggcaatcagcaacagcactacctagatgtgatcaagcgcatgctagtccagtgcatgcaagaccaggaacatccttcgattaggaccctctctgcaagggccaccgctgcctttatcctggccaatgagcacaacgttgccctatttaaacatttcgcagacctgctaccgggttttctacaggctgtaaacgattcgtgctatcagaatgacgactctgttttaaagtccctggtggagattgccgataccgtgccaaagtacctgcggcctcacttggaagctacattgcagctgtctctgaaactttgcggcgatacgtccctgaataacatgcagcgccagctagcactagaagtgatagtaacactgtctgagaccgctgcagccatgctgcgaaaacacactaacatcgtggcccagacgatcccccaaatgctagcgatgatggtagacctggaggaggatgaagattgggcaaacgccgacgaactggaggatgatgatttcgactcaaatgctgtagctggggagagcgccctcgaccgaatggcttgtggattgggtgggaagctcgttctacctatgattaaggaacacatcatgcaaatgctgcagaatccggactggaaataccgtcacgctgggctgatggctctcagtgctatcggcgaggggtgccaccagcagatggaaggcatactaaatgagatcgtgaactttgttttactctttctgcaggatccacacccaagagtcaggtatgcggcttgtaacgccgtgggccagatggccacagactttgcacccggattccagaagaaattccatgagaaagttatagcagcacttcttcagactatggaagaccagggcaatcagagggtccaggctcacgctgctgctgccctgattaattttaccgaggattgtcctaaatcacttctgatcccgtatctcgataacctcgtgaagcatttacactccatcatggtcctgaagctgcaggaattgattcaaaagggtacaaagctagtgttggagcaagtggtgaccagtatagccagtgtcgccgacaccgcagaggagaaatttgttccctactacgatctctttatgccatcactgaaacatatcgtcgagaacgccgtgcagaaggagctgcgccttctcaggggtaaaaccatcgagtgcatcagcctgatcgggctggctgttgggaaagagaaattcatgcaagatgcctctgatgttatgcagctgttactgaaaacccagaccgatttcaacgacatggaagacgatgaccctcagatttcctatatgatttctgcctgggcacgcatgtgcaagatcctggggaaagaatttcagcagtatctcccggtcgtgatgggccctctcatgaagacagcctcaatcaaacctgaggtggctctgctggacacccaggacatggagaacatgtcagacgacgacgggtgggagttcgtgaacctgggtgaccagcagagtttcggcattaaaactgctggcctggaggagaagagtaccgcctgtcagatgctcgtgtgttacgcaaaggaactcaaggaaggctttgttgaatataccgagcaggtagtaaagctaatggtgccactcctcaagttttacttccacgatggcgtgcgcgttgccgctgctgagtcaatgcctctcctgttggagtgcgcacgggtgcgtgggcctgagtaccttacgcaaatgtggcatttcatgtgcgatgcccttattaaggccataggtacagaaccagactcggatgtgctgtctgagatcatgcatagctttgctaaatgtattgaggtcatgggcgacggctgcctgaataatgagcatttcgaggagctcggtggcatcctgaaagccaaattagaggagcacttcaaaaaccaagaactaaggcaggtgaagcggcaggatgaggactacgatgaacaagttgaggagtcactgcaggatgaggacgataacgatgtatacattctgactaaagtgagtgacattttgcactccatattttcttcctataaggagaaagttctgccttggttcgaacaattgctgccgcttatcgttaatctgatctgtccacaccggccatggcccgaccgtcagtggggtttgtgcatattcgatgacgtaattgagcactgcagtccggcatcttttaagtatgctgagtattttttgaggcctatgctccagtatgtgtgcgacaatagccccgaagtccggcaggccgctgcgtacggacttggcgttatggcacagtatggtggcgacaactataggcctttttgtacagaagccttgccgctcctcgtgagagttatccagtcagcggactcaaagactaaagaaaatgtgaatgctacagagaattgtatttcggctgtagggaagattatgaagtttaagcctgactgcgtcaatgtggaggaagtgctccctcattggctgagctggctgcccctgcacgaggacaaggaagaggcagttcaaactttcaactatctgtgcgacctcatagagagtaaccatcctattgtactcggccctaataacactaatctgcccaaaatctttagcattatcgccgagggcgagatgcatgaggccataaaacacgaagacccctgcgcaaaacgcctggcgaatgtggtgcggcaagtccagacttccgggggtctgtggactgaatgcattgcacagctgagtcctgagcagcaagctgccattcaggagctgctgaattccgcctag

SEQ ID NO: 30890 - DNA, 1011 bp, synthetic construct
  source 1..1011: mol_type = other DNA; note = Synthetic coding sequence
atgaaagcgactgcgatgacaagtgcctggctagcacagggtggcgcacatgtgactatcaacgcccgtgcggaagaggacgtcgagccggagtgcatcatggagaaggttgccaaggcatctggcgcaaactattcttttcataaggagtcggggcgatttcaggacgtcggcccacaggcacctgttgggtccgtgtaccagaaaactaatgcggtgagcgagataaaacgtgtcggcaaggatagcttctgggccaaggcagagaaggaagaagaaaaccgtcgcctagaagagaagagacgggctgaggaagcccagcggcaactcgaacaggaacggcgtgagagggaactcagagaagctgctcgccgagaacagcgttatcaggagcaaggcggagaagcatcccctcagtcccggacctgggaacagcagcaggaagtagtgtcccgaaacagaaatgagcaggagtccgccgttcacccccgtgaaatattcaaacagaaagagcgggctatgagtacaacaagcattagcagcccccagccgggaaaactaaggagtccgtttcttcagaagcaactcacacagcccgaaacgcacttcgggagagaacctgccgctgccatttcacggcctcgtgccgatcttcccgcagaggagcctgcccctagcacccccccttgtcttgtccaagctgaggaggaggccgtctatgaagaaccccctgagcaggaaactttctacgagcagccccctctggtgcaacaacagggcgctggttccgagcacatcgaccatcatatacaggggcagggcctgtctggccaaggactctgcgctagagctctctacgattatcaggcggcagacgataccgaaatctcattcgacccagaaaatctcattaccggaatcgaagtgatagatgaaggctggtggcgcggatacggccctgatggccatttcggaatgtttccagccaattacgtcgagctcatcgaatag

SEQ ID NO: 30891 - DNA, 78 bp, synthetic construct
  source 1..78: mol_type = other DNA; note = Synthetic coding sequence
atgtggatgcacgtggcaaaggtccaccctaagggcggagagatggtgggggctatcaggaacgcagcatttctatag

SEQ ID NO: 30892 - DNA, 312 bp, synthetic construct
  source 1..312: mol_type = other DNA; note = Synthetic coding sequence
atggctgaactcatccagaaaaaactgcaaggcgaggtggagaagtatcagcagttacagaaggacctgagtaaatcaatgtcaggccgacagaagctggaggctcaactcacagagaataatatagtgaaggaggagttagctcttctggatggctctaacgtagtttttaaactgttaggcccagttttggtgaagcaagagttgggtgaagcgagagccaccgtggggaagcgcttggattatattaccgccgagatattcctgcgtaccataccggaccctggcgacgttcccgatagcttcttttag

SEQ ID NO: 30893 - DNA, 4101 bp, synthetic construct
  source 1..4101: mol_type = other DNA; note = Synthetic coding sequence
atggcggacacagatctgttcatggagtgtgaggaggaggaactggagccctggcagaagatctccgacgtgatcgaggactcagtcgtcgaggactacaacagcgtagataaaaccactaccgccggaaaccctttggtccagcaaggcggacagccacttatcttgactcaaaacccggctccgggactgggcactatggtgacacagcctgtcctccgtccggttcaggtcatgcagaacgccaaccacgtaacctccagtccagtggcttcgcagcccatatttatcacgactcagggctttccagtaaggaatgtcagacccgtgcagaacgccatgaaccaggtgggtatcgtgctgaacgttcagcaggggcaaaccgtgcgtcccatcacactggttccagcaccaggaacacagtttgtaaagcctactgtgggcgtgccccaggtgttcagccagatgactcccgtccgcccaggatcaacaatgccagtgagaccaacgaccaacactttcactactgtaattcctgccacactgacgatacgaagtaccgttcctcagagtcagagtcaacagacaaagtctacaccttctacatcaactacgcccacagcgactcagcctacttcacttggtcagcttgctgtccagtcccccggacaatctaaccaaacaaccaatccaaagctcgccccatcttttccatccccaccagccgtgtccatcgcatcattcgtgacagtgaaacgcccaggcgtgactggcgagaattccaacgaggtggctaagttggtaaacaccttaaataccatcccttctctcggacaaagtcccggaccagtggtggtcagtaacaactcctctgcccatggcagccagcggaccagtgggcctgagagttccatgaaagttacgtcgtccatcccagtgtttgatctgcaggatggagggcgtaagatttgtcctagatgcaatgctcaattccgtgtgactgaagccctcaggggtcatatgtgttactgctgtcctgaaatggtggagtaccagaaaaaaggtaagagtctggactcggaaccttcagttcccagcgcagccaaaccgcctagtccagagaaaactgctcctgttgcgtctacaccttcgtcaacgcccatccctgcactgtccccacctactaaggtgcctgaacctaatgaaaacgtgggcgacgcagtccaaaccaaactgatcatgcttgtagacgacttctactacggtcgcgacggcggtaaagtagctcagctgacaaactttcctaaggtggctacttcctttcggtgtccccactgcactaaacgcctaaagaataacatccgtttcatgaatcatatgaaacatcacgtggagttagaccagcaaaacggtgaggtggacggccacaccatatgtcagcattgctatcggcagtttagcaccccctttcagttacagtgtcacctggaaaacgttcacagtccatatgaatctacaactaaatgcaagatatgtgaatgggcctttgagagcgaaccactattcctccagcacatgaaagacacccataagcctggagagatgccctacgtgtgccaaccctatttcccttcctatgtcacacaagtgtgccagtataggtcctctttatattccgaggttgacgtccacttcaggatgattcacgaggacacacgtcaccttctttgtccatactgtcttaaagtctttaaaaatgggaatgccttccagcagcattatatgcgacatcagaagcgcaatgtctaccactgtaacaagtgccggcttcagttcttattcgctaaagacaagattgagcataaattgcagcaccataaaactttccgtaagccaaagcagctcgaggggctgaagcctgggaccaaagtgaccatacgggcaagtcggggacagcctagaacagtgcccgtgagcagcaatgatacacctccaagcgctctgcaagaggcagctccgctcaccagctccatggaccccctgcctgtgttcctgtatcctcccgttcagaggtctatccagaaaagagctgtcaggaagatgagtgttatgggtcgacaaacgtgcctggagtgttcgttcgagatcccagacttccccaatcattttcccacctatgtgcactgcagcctgtgtagatatagcacttgctgttcccgagcttatgctaatcacatgataaataatcacgtgcctcggaaatcacccaagtacctagccctttttaaaaattcagttagtggcattaagttagcctgcaccagctgcacattcgtcaccagcgttggcgacgctatggccaaacaccttgtgtttaacccaagccatcggagctccagcatcctacccagggggctgacctggatcgcccactccaggcacggccagaccagggaccgggtacacgaccggaatgtcaaaaatatgtatccaccgccttcctttcctaccaacaaagcagctaccgtcaaatcagccggtgccacccccgcagagcccgaagagttgctaacgccattggcccctgctttgccctctccggcttcgaccgccacacccccaccaactcccactcatcctcaggcacttgccctccccccactggccaccgagggggctgagtgtcttaatgtggatgaccaggacgagggatctcctgtgactcaggagcccgaactggccagcggtggagggggttctggcggtgtgggtaagaaggaacagttgagcgtgaaaaagcttagagttgtcttgttcgcactctgttgcaacacagagcaggcagccgaacacttccgaaatccgcagaggcgtattcgccgttggctccgcagattccaggcaagccagggagagaacctggaggggaaatatttatctttcgaagctgaggaaaaactggcagagtgggtgttaacacagagagaacaacagctgcccgtgaatgaggaaactctcttccaaaaagccaccaaaattggcaggagtctggagggcggttttaaaatctcttacgaatgggccgttcgattcatgctgcgacaccacttaacacctcacgctaggagggcagttgcccataccctgcctaaggacgtggctgagaacgccggattatttattgattttgttcagagacaaatacacaatcaagacctcccccttagtatgatcgttgccatcgacgaaattagcctgttcctggacacagaagttttgtctagcgatgatcggaaggagaacgcactgcagacggtgggcaccggggaaccctggtgtgacgtcgtactggctattcttgccgatggcactgtcttaccaacattagtattctatcgcggacagatggaccagcctgcgaacatgccagacagcatccttttagaagccaaagaatcagggtattcagacgatgagattatggagctgtggagcacgcgggtgtggcagaaacacaccgcgtgccaacggtccaaggggatgcttgtgatggactgccatagaacgcatctcagtgaagaggtgctggcaatgctttcagcatcttctacgctcccagccgtggtcccagccggatgtagtagcaagatccaaccactggacgtgtgcataaagcgcactgtcaaaaattttctccacaagaagtggaaggagcaggccagggagatggctgacacagcctgtgattcagatgtgctgctccaactggtgttggtatggctgggggaagtcctgggcgtgattggtgactgtcctgaactagttcagagatcctttctggtggccagtgttctaccagggccagacgggaatatcaactccccaacacgaaacgcggacatgcaagaggaactgatcgcttccttagaagaacaactgaagctatctggagagcatagcgaatctagcacgcctcgccctagatccagccccgaagaaacaattgaacccgaatctctgcatcaactgttcgaaggcgagtcagagactgagagtttctacgggtttgaagaagccgaccttgatctgatggaaatctag

SEQ ID NO: 30894 - DNA, 564 bp, synthetic construct
  source 1..564: mol_type = other DNA; note = Synthetic coding sequence
atggatatttcaaaggggttaccagggatgcagggaggactgcacatatggattagcgaaaacaggaagatggtcccagttcctgaaggggcttacggcaactttttcgaagagcactgttacgttattcttcatgtgcctcaatctccaaaggctactcagggggcatcttccgatttacactattgggttggtaaacaggcaggggcagaggcccaaggagcggctgaggcgtttcagcagagacttcaagacgaattaggaggtcagaccgtcctgcatagggaggcccagggccacgagagtgactgcttttgttcctactttcgccctggaattatttaccggaagggaggcttggcaagcgacctgaaacatgtggagactaatctcttcaatatacaacggcttctgcacatcaaaggcaggaagcatgtcagtgctactgaagtggagctgtcatggaatagttttaataagggcgatattttcctcctggacctggggaaaatgatgatccagtggaacgggcctaagacttctatatctgaaaaagctcggtag

SEQ ID NO: 30895 - DNA, 1329 bp, synthetic construct
  source 1..1329: mol_type = other DNA; note = Synthetic coding sequence
atgccccttgagaatctggaagaagagggtttaccgaaaaaccccgatcttcgaattgcgcaactccgcttcctgctgagtctgcctgagcacagaggcgacgccgctgtgcgcgatgaactgatggctgccgttcgcgacaataacttctggaaccggataagacaggagcagactgaagattgtcctccgtccagcccttctcgaggctggcattgccaggattggccttctaggaagcctcctacctccatccggctgtgttttgctaagccaatcatcaagagacaccgaatgcctagttatatggcaccttactacgaggccctctgcaagtcccttgattggcagatcgatgtggacttgctgaacaaaatgaaaaaagcaaatgaagacgagcttaaaaggcttgacgaagagttggaggacgccgaaaaaaacctgggggaatcagaaattcgggatgcaatgatggctaaggccgaatatctgtgcagaattggggataaagaaggcgctctgacagcattccgcaaaacctacgataaaacagttgcactggggcaccgcttggacatcgtcttttacctcctccggatcgggctcttttacatggataatgatcttatcacaagaaacactgaaaaggccaagtccctgattgaagagggcggagattgggaccggagaaacaggctgaaggtttatcaaggcctgtattgtgtcgctatacgggattttaagcaggcggcagaactgtttctcgacacagtgtccacatttacaagttacgagctgatggattacaagacttttgtcacatataccgtgtatgtcagtatgatcgctctggaaagaccggatctgagggagaaggttatcaaaggcgctgagatactcgaggtgcttcactctctgcccgctgtgcgccagtatttatttagtttgtacgagtgtaggtattctgtgttctttcaatctctggctgtcgtcgagcaggagatgaaaaaggattggctttttgcccctcattatcgctattacgtccgcgaaatgcgcattcacgcctactcccagcttctggaaagctataggagccttactctgggctacatggcggaggcgttcggggttggggtcgaattcatcgaccaggagctgtcgaggttcatcgctgccggtcgactgcactgtaagatcgataaagtaaacgagatcgtggagaccaatcggcctgattccaagaattggcagtaccaggagacaatcaagaaaggggacttgctgctgaaccgcgtgcaaaaactgagcagagtgattaacatgtag

SEQ ID NO: 30896 - DNA, 333 bp, synthetic construct
  source 1..333: mol_type = other DNA; note = Synthetic coding sequence
atgctctgttggggtaacgcaagcttcggacaactgggtctcgggggaatcgatgaagaaattgtcctcgagccacggaaaagcgacttctttatcaacaagagggtccgagacgtcggttgtggcctgcggcatactgtgttcgtgctggacgacggaacagtgtacacttgcggttgtaacgatttaggccagctcggccatgagaagagccgtaaaaagccggaattccggagctgcttccctggcagaagcgccatggcaccgtcccggcttaccgctaccagcgccagtcaggtccaggcgattctgctcccccagccacccgaatag

SEQ ID NO: 30897 - DNA, 930 bp, synthetic construct
  source 1..930: mol_type = other DNA; note = Synthetic coding sequence
atggtgtgctggcagtctgtgtctgtgtggagcgtcgccggtagggtggagatgacagtctccaagttcatggccatccaaaaagccttgcagcctgattggtttcagtgtctatccgacggcgaagtgtcatgcaaggaggctacttccattaagcgggttcgcaaaagcgtcgatagatccctcctttttttggacaactgtctgaggctgcaggaggaatccgaagtgctccagaagtcagtgataatcggcgtaattgagggaggagatgtaatggaagagcgcctgcgctcagcaagggaaacggccaagcgtcccgtggggggattcctgctggatgggttccaagggaatccaacaaccctggaggcaagactcagactgctatcttctgtcactgccgagctcccagaagacaagcccagattgatctcaggtgttagccggcctgacgaggtgctggaatgcatcgagaggggggttgacctttttgaaagcttcttcccgtatcaggtgacagaacgagggtgtgctcttaccttcagttttgattaccagccaaaccctgaggagacactgttgcagcagaacggcactcaggaggagatcaaatgcatggatcagataaaaaaaattgaaaccacgggatgcaatcaagagattacttccttcgagattaatctgaaagagaaaaagtaccaggaggatttcaatcctctggtccggggttgtagttgttattgctgtaagaatcatacccgcgcatatatacatcacttgttggtgactaatgaactgctcgccggtgtattgcttatgatgcacaactttgagcactattttggcttcttccattacatacgggaggccctgaagagtgataaactggcacagctgaaggaacttatccatcgtcaggcctcctag

SEQ ID NO: 30898 - DNA, 384 bp, synthetic construct
  source 1..384: mol_type = other DNA; note = Synthetic coding sequence
atggtccttatcctgggccgaaggctcaatagagaagatcttggggttagggacagtcccgcaaccaaacgtaaggtgtttgaaatggatccaaagtccctaacagggcacgaattcttcgatttttcctctggatcatcacacgcggagaacatcctgcagatttttaatgagttcagagactcccgcctctttacagacgtgatcatctgtgtcgaagggaaggaatttccatgccatagggcagtcctttctgcctgctcctcgtatttcagggctatgttctgtaacgatcatcgggagtcacgggaaatgttggtagagattaatggcatcctcgcagaagcaatggagtgcttcctgcagtacgtgtacacgggatag

SEQ ID NO: 30899 - DNA, 1581 bp, synthetic construct
  source 1..1581: mol_type = other DNA; note = Synthetic coding sequence
atggaggaaattcccgcacaggaagctgctggcagccccagagttcagtttcagtcgctggaaactcaatcggagtgtttaagcccggaaccgcagtttgttcaggacaccgacatggagcaaggtcttaccggtgggttccccatctctaagccagatgggattagtcagctagaacaggacttacaagtctttgacttggagactaaaacccgggaggtattgagggacgactgttccgatggggagaccagagaagagaacaaactgttgatccctaagcaaaagatttctgaagaggttcattcatataaggtgcgggtgggacggctcaagcacgacatcacacaggtgcctgaaactcgagaagtctataagagtgaggatcgactggaacgactgcaggaaattcttaggaagttcctgtacctagagagggaatttcgccagatcacaattagtaaggaaaccttcacaagtgagaagaataatgagtgtcatgagccagagaaaagcttctcccttgactccaccatagatgcggaccagagagtgctcagaatccaaaataccgacgacaatgataagtatgatatgtcttttaaccagaactccgcgtctgggaagcacgaacatctgaatctgactgaggattttcagtcgagcgagtgcaaggagtccctcatggatctgtctcacctgaacaagtgggagtccatccccaacaccgagaaatcttataagtgtgatgtctgcggcaaaatcttccatcaatcctccgccctcactcgacatcaacggattcacactcgggagaaaccgtataaatgcaaagagtgcgagaagtcttttagccagtcctcttcactatcccggcataagaggatccacactagagagaagccatataagtgcgaagcctcagacaagtcttgcgaggctagtgataagtcttgttctcctagttctggcatcattcaacataagaagatccatacaagggcaaagtcctacaaatgttcttcatgtgaacgagtctttagccgcagcgtccatctgacccagcaccaaaaaatccataaggaaatgccgtgtaagtgcactgtgtgcggatctgacttttgccatacgagctatttgctggagcaccagagggttcaccacgaagaaaaggcatatgagtacgatgagtacggtctggcctatatcaaacagcagggtatccatttccgcgaaaaaccatacacatgcagcgaatgtggtaaggacttccggctcaacagtcacctgatccagcaccaaaggatacacacaggggaaaaagcccacgaatgcaacgagtgcggaaaggccttctcacaaacctcgtgtctgatacagcatcacaaaatgcacagaaaggagaagtcatacgaatgcaatgagtacgagggaagctttagccactcgtctgacttgatcctgcagcaggaggtcctgactcggcagaaagcattcgattgcgatgtgtgggaaaagaatagttcccagagggcacaccttgtgcagcaccagtcgattcacaccaaagagaactcttag

SEQ ID NO: 30900 - DNA, 195 bp, synthetic construct
  source 1..195: mol_type = other DNA; note = Synthetic coding sequence
atgcccgaggaccaggtggggaaactagaggccactgagaacacaatcagcgccatggcagcagcagcagccgagcagcaacagttttacctgttgctcggaaacttgctgagtcctgacaacgtggtgcgcaaacaagccgaggaaacctatgaaaacatcccgggacagagtaagattacctttctgctctag

SEQ ID NO: 30901 - DNA, 741 bp, synthetic construct
  source 1..741: mol_type = other DNA; note = Synthetic coding sequence
atggccgagcaggagcagcgaaagattccattagttcctgagaatctgctgaagaaacgcaaggcatatcaggcactcaaggcgacccaggctaaacaggccttactcgctaaaaaggagcaaaagaagggtaaggggctccggtttaagagattagagtccttcctgcacgacagttggcgtcagaagagggataaagtgagattgcgcaggttggaagtgaagcctcacgcattggagctgcctgacaagcattcattggcgtttgtggtccgaatagagagaatcgatggagtaagccttctcgttcagcgcactatcgccagattgcgcctgaaaaagatcttctcaggagtattcgttaaggtcacaccacagaatttgaagatgctgcggatcgtggaaccttacgtgacgtgggggttccccaatctcaaatccgtccgcgagttgattctcaagagggggcaagcaaaggtgaaaaacaaaactattcccctgacagataatacggtgattgaagagcatctcggaaagtttggggtcatatgccttgaagacctaatccacgagatagccttccccggaaagcactttcaagagatctcgtggtttctctgcccattccatctctctgtagcgagacatgctaccaaaaatagagtgggctttctgaaggaaatgggtactccaggttacaggggagagaggatcaatcaactgatcagacaactcaactag

SEQ ID NO: 30902 - DNA, 1296 bp, synthetic construct
  source 1..1296: mol_type = other DNA; note = Synthetic coding sequence
atggctgcaaacctatcccgcaacgggcctgccttacaggaggcatatgttcgggtggttacggagaagagtcccaccgattgggcgctgtttacttacgagggtaactccaatgacatccgggtggccggtaccggcgaggggggactggaagagatggtggaggagttgaatagtggtaaagtcatgtacgccttctgccgtgtcaaggatcccaactccggcctgccaaagttcgtgctgatcaactggaccggggaaggggtcaatgatgtcagaaaaggcgcttgcgcaagtcacgtttctacaatggccagtttccttaagggcgctcacgtgacaatcaacgcacgtgcagaggaagatgttgagccagagtgtatcatggaaaaggttgctaaggcttctggagctaattatagttttcacaaggaatccgggagattccaggatgttggcccacaggctccggtgggctccgtgtatcagaagactaatgccgtgagtgaaattaagcgagtgggtaaagacagtttttgggccaaggccgaaaaggaagaagaaaatcgcaggttagaggaaaaacgaagggcagaagaagcacagagacagttggagcaggagcgcagagagcgggagctgcgggaggcagcccgacgggaacaaaggtatcaagagcagggaggtgaggcttcgccccagtctcgaacatgggagcagcagcaggaagtggtgagcagaaacagaaacgagcaggagtccgccgtccatcctcgcgaaattttcaaacagaaagagcgagctatgtctaccacatctatatccagccctcagccaggaaagctgcggtcacccttccttcaaaagcagcttacccagccagaaactcattttggtagggagcccgctgccgctatttccaggccccgtgctgatctgcctgccgaggaaccggctccttccacaccaccttgccttgtgcaggcagaggaagaggcagtttacgaagaaccccctgagcaagaaaccttttacgagcaaccgcctttagtgcagcagcagggtgcgggttccgaacacattgaccatcacatccaaggtcaaggtctgtcaggccaggggttgtgcgcacgcgcactgtacgattatcaagccgcagatgacactgaaatttcctttgatcccgaaaatctcatcacaggtatcgaggttattgatgaagggtggtggcgcggatacggcccagacgggcacttcggaatgttcccggctaactacgttgaactgattgaatag

SEQ ID NO: 30903 - DNA, 1854 bp, synthetic construct
  source 1..1854: mol_type = other DNA; note = Synthetic coding sequence
atgatcgagaagatgcagggatccaggatggatgaacagaggtgctcgtttcctccaccactgaagactgaggaggattatatcccgtatccctcagtgcatgaagtgctcggacgggagggtcctttccccctgatcctgctaccccaatttggcggttactggatcgaaggtactaaccacgaaattacatccatcccggagacggagccacttcagagccctacaactaaagtgaagctggaatgtaatccgacagcccgaatctatagaaaacactttcttggaaaggaacactttaattactattctctggacgctgcccttggccaccttgtgttctccttgaagtacgatgtaataggagatcaggaacacctgaggctgctgctacggacgaagtgcaggacatatcatgacgtcattccgatcagctgtttgactgaattccctaacgtcgtccagatggcaaagctcgtgtgcgaagacgtgaatgtcgacagattttaccctgtcctgtatcccaaggcctccagacttattgtcacctttgatgaacacgtgatctcgaataactttaagttcggcgtgatttaccagaagctgggccagacttccgaagaggagcttttctccaccaatgaagagtcacccgcatttgttgagttcctggaattcctgggtcagaaggtcaagctgcaagacttcaaaggttttaggggcggtctggacgtaacacacggacagacagggactgaatcagtatactgtaacttccgcaataaagaaattatgttccacgtgtcgactaagctgccctataccgagggagacgcccagcagttgcaaaggaagaggcatataggcaacgacattgtggcagtagtgttccaagacgagaacacaccattcgttccggacatgattgccagcaacttcctccatgcatatgtggtggtccaagccgaggggggaggtcccgacggccctctgtataaggtctcagtcactgccagagacgatgtccccttctttggacccccacttcccgaccccgcagtttttcgtaaaggtcccgagtttcaggaattcctgctaacaaagttgatcaacgctgagtatgcttgctataaagccgaaaagttcgccaagctggaggagaggacaagagccgcactactcgagacactatatgaagagctccatatccacagccagagtatgatggggctgggtggagacgaggataagatggagaatggaagcggcggagggggattcttcgaatcttttaagagggtcatccgttcccgctcgcagtccatggatgccatggggctgtctaataagaagccaaacaccgtgagcacgtctcatagtggctcatttgctccaaataaccccgatctggctaaggccgctggtatatcgctgttaatccctgggaagtcagcgtctcgtttcggcagacggggaagcgccatagggataggcacagtggaagaagttgttgtcaggggggctgccggtagtggcggttgcctccatgcactgttctctgctagatcacaggacggcggacacataggagacgtcgccccactccctccaggtcaagcgcctggcagggccggttggtcgggaggatcatccgatggaacccaacacttgctctgggggttggttcctgtgcccgaacccgtacctctgactaggggattttggccgtgtctgggtccctgggaccccggaccagtgccggctagaatccggtatcccaaggccctgcacccagccgctcgtccacctataagtcccgtgtgtatggagcggcacccatcaccactgccttag

SEQ ID NO: 30904 - DNA, 1224 bp, synthetic construct
  source 1..1224: mol_type = other DNA; note = Synthetic coding sequence
atgggtaacacttcattcaacgaggttatggaagcccagctccccagccacggtggacctaaacccagcgctgaatctgacatgggtacgagaagagattacatcatggccaagtacgtggagcaccggttcgccagacgctgcacaccggagccccagcgactgtggactgcaatttgcaatagagacttgctgagtgtgttggaggccttcgccaatggccaggattttggccaacctctccctggccctgatgcccaagcaccggaggagcttgtgctgcatttggcagtaaaagtggctaaccaggcttcactgcctttggtggattttatcattcagaatgggggtcatctggacgcgaaggccgcagatggcaataccgcactgcattatgccgctctatataatcagcccgactgcctgaagctcctcctgaaggggagagcactggtagggacggtcaatgaagccggagagaccgcgcttgacattgcacggaagaaacaccataaagagtgcgaagagctcttggaacaagcccaggctgggacattcgcgttccctcttcatgtagactattcctgggtaatcagcacggagccgggatccgactccgaggaagatgaggaggagaaacggtgtttgctgaaacttcctgctcaggctcattgggcgtctgggaggctggacataagtaataaaacctacgaaacagtagcctccctgggagcagcaactccccagggcgagtcagaggactgcccacctcccttgcccgtaaaaaacagctctaggacgctggtgcaggggtgcgcgaggcatgcgagcggagatcgatccgaggtctcctccctcagcagtgaagcacctgaaactccggagtcactgggaagcccagcaagctcctccagcctgatgagccctcttgaacccggagacccaagtcaggcccctccaaactccgaggaaggcttgcgagagccccctggaacttcccgtcctagcttgacaagcggaacaaccccctccgaaatgtatcttcctgtgagattctcttctgagagcacaagaagttaccggaggggagctagatccccggaggatggcccatccgcaagacagcccttgcccagaagaaacgtcccagtgggaattaccgagggagacggttctcgtaccggctcattgccagcttcaagcgtgcaattgttgcaagactag

SEQ ID NO: 30905 - DNA, 813 bp, synthetic construct
  source 1..813: mol_type = other DNA; note = Synthetic coding sequence
atggccatggagatgcggctgcccgttgcacggaagccgctgtcagaacgccttgggcgagataccaagaaacatctcgtggtccccggtgatacgattacaactgacactggcttcatgagaggacatggtacttatatgggagaagagaagctgattgccagtgttgcaggctcagtggagcgcgtcaacaaactgatttgtgttaaagccttgaaaactcgatacattggggaagtcggggacatagtagtcgggagaattaccgaggtccagcagaagagatggaaggtggagactaactctcggctcgactcagtcctgcttctttcctccatgaatctgcctggtggggagctacggaggcggagtgctgaggatgagctggcgatgcggggtttccttcaggaaggagatctgatttccctgggccagggagtcctggtgcaagtgtcaccaagcctcgttaaaaggcagaaaactcatttccatgacctgccatgcggcgcatccgtgatattgggcaacaacggctttatttggatttatcccacacctgaacacaaggaggaagaggccggtggttttatcgccaacctggagccagtgagtctcgccgatagagaggtgatctctagattgcgcaactgtataatatccttagtgacccagcggatgatgctctacgacacctcgattctatattgctacgaagcaagtctgccccatcagatcaaggacatactgaaacctgaaattatggaagagattgtcatggaaactaggcagcgcctactcgagcaggaagggtag

SEQ ID NO: 30906 - DNA, 297 bp, synthetic construct
  source 1..297: mol_type = other DNA; note = Synthetic coding sequence
atgcctgaagatcaggtgggaaagctggaggctaccgaaaatactatttcagccatggcagcagctgcggctgagcagcaacagttttacctactactggggaatctcctgagccccgacaacgtcgtgcggaaacaggcagaagagacttacgagaacattccaggtcagtccaaaatcacctttctgctacaagcaattagaaacactaccgcagccgaggaggccagacagatggccgcagtgctcctgcgcaggctcttgagctctgccttcgatgaggtgtatcctgcttag

SEQ ID NO: 30907 - DNA, 306 bp, synthetic construct
  source 1..306: mol_type = other DNA; note = Synthetic coding sequence
atggacgaggttgaacaagaccaacacgaggcgcgtttgaaagaactgttcgattcatttgatacaacaggtaccggaagcctgggacaggaagaactgacagatttatgtcatatgctgtcactggaagaggtggctccagtgctccagcagacactgctacaagataacttgctgggcagggttcactttgatcaatttaaagaagcactgatattgatattaagtcgaacactttctaacgaggaacattttcaggagccggattgcagcctggaagctcagccgaagtacgtcagaggatag

SEQ ID NO: 30908 - DNA, 1065 bp, synthetic construct
  source 1..1065: mol_type = other DNA; note = Synthetic coding sequence
atggcccactcgcctgtcgctgtacaagtgccaggtatgcaaaacaatattgccgatcctgaggagctgtttacgaaactggagaggataggaaaagggtcattcggggaggtgtttaaaggcatcgataaccgcacccagcaagtagtggccattaagatcattgatttagaagaggcagaggacgaaatagaggacattcagcaagaaatcacagtcctttctcagtgcgacagcagttacgtgaccaaatactacggttcctaccttaaaggaagcaaactgtggattataatggaatacttgggcggaggctctgccttggatctccttcgcgcaggcccttttgatgaattccagattgccacaatgttgaaggagattcttaaaggactggactacctgcatagtgaaaaaaagattcacagagatattaaagctgcaaacgttctgttaagtgagcagggcgacgttaagctggccgactttggagtcgcagggcagttaaccgatactcagataaaacgcaacaccttcgttggaacccccttttggatggcccctgaagtgatacagcagtcagcctatgattccaaaaggccaacagctaaagagttgctcaaacataaatttatcgttaagaactctaagaagactagctatctaaccgagctcatagaccggtttaaacgctggaaggccgagggccactccgatgacgagtcggacagcgagggaagcgattcggaaagcacttcaagggaaaataacactcatcctgaatggtctttcactaccgtcaggaaaaagcctgaccccaaaaaggtgcagaatggtgctgaacaggatctggtgcagacgttgagctgtctgtccatgatcatcacacctgcctttgctgagctaaaacagcaggacgagaataatgctagcagaaaccaagcgattgaggaattagagaagagcatagccgtggctgaggcagcttgccctgggattaccgataagatggtcaagaagttaattgagaaattccagaagtgctctgccgacgagtccccttag

SEQ ID NO: 30909 - DNA, 522 bp, synthetic construct
  source 1..522: mol_type = other DNA; note = Synthetic coding sequence
atgccgaggaaggggacgcagccttctacagcccgacgcagggaagaagggccaccccctccctcacctgatggggctagttcagatgccgagcctgagccccctagcgggaggacagagtcccccgctacagccgctgagaccgctagtgaggagttggacaaccggtccttggaggagatccttaactctatcccaccaccgccacccccagccatgaccaacgaggccggagctccacgccttatgatcactcacattgtaaaccagaatttcaagtcatacgctggcgaaaaaatcctcggcccttttcataaaaggttttcttgtattattgggcctaatggttctggcaagtccaacgtaatcgatagtatgctctttgtatttggataccgggcacaaaagattcggtcaaaaaaactcagcgtgcttattcacaattcagatgagcataaggacatacagtcatgtactgtggaggtacacttccaaaaaatcatcgataaagagggcgattag

SEQ ID NO: 30910 - DNA, 801 bp, synthetic construct
  source 1..801: mol_type = other DNA; note = Synthetic coding sequence
taaccccgtgcagctgctcgggtgagagctgctggagaagctctggagagacgcaggcgctggctaggcaggctgagcccctctgcacctcgtcccaggcgagccagaccctcactgcggagggcatcggcctgggtgagagatcgtgtggctgggagacccggtgcgttgcccggttttcaggcttccggtgttgccggagaagcccaaaaagcgcctggccacccagccgctcctgcccctgctgccagctgccttactgaggccgatggtcgggtgtttctgcatgccttcaggctggcgttgatccagttgcaaatatctagtatcaagagtgataacgtgacccgggcatgctccttcattagagaggcagcgacccaaggggcaaagatcgtgtccttgcccgaatgttttaatagcccctacggggcaaaatattttcctgagtatgctgagaagataccaggcgagtcaacccagaaattatccgaggtggccaaggaatgcagcatctatttgattggtggatcaatccccgaggaagatgctggtaaactttataatacctgtgcagtattcggacccgatgggacacttcttgcgaaatatcgcaaaatacacttgttcgacatagacgtacccggaaaaattaccttccaggaaagtaagactctgtcgccgggtgattcattttcaacctttgataccccttactgcagggtcggccttggaatctgctatgatatgcgctttgctgagctggctcagatatacgcgcagagaggtgaggccgtttag

SEQ ID NO: 30911 - DNA, 216 bp, synthetic construct
  source 1..216: mol_type = other DNA; note = Synthetic coding sequence
atggattcccttcccgacgagttctttgtgagacatccagctgtagaagaccaaaggaaagaagaaacggagaacaaactagaaaagtcatccggccagctgaataagcaggaaaatgacatacctaccgatcttgtgcctgtcaatctgttgctggaagtgaaaaaattgctgaatgcgatcaacacactgcctaaaggtgtggtgccacattag

SEQ ID NO: 30912 - DNA, 2130 bp, synthetic construct
  source 1..2130: mol_type = other DNA; note = Synthetic coding sequence
atgtcggtagaatccgagcaattaacaggggtgccgctggatgatagcgccattactcccatgtgtgaagttaccgggggacgatcttattctgtctgcagcccgcgaatgctcaaccagtgtctcgagtccctagtgcaaaaggtgcagagtggggtggttatcaattttgagaaggccggtcctgacccttctcccgtagaggacggtcagccggacatctcccgcccattcggatcccagccctggcattcatgtcataaattgatctatgtgaggccaaaccctaaaactggcgtaccgataggacattggcctgttccagaatctttttggccagatcagaattctccgaccctgccaccgcgaacttcccacccagttgtcaagtttagttgcacagactgcgagcctatggttatcgataagttgccgttcgacaagtacgagctggagccctcccctctgacccagtttatcctagaaaggaagtccccacagacatgctggcaagtatacgtgagtaactcagccaagtattctgaacttggacacccctttgggtatctcaaagcgagtaccgcactgaactgtgtgaacctgtttgtgatgccctacaactatcctgttctgctccccctgctggatgatctattcaaagtgcataaagccaaaccaaccctgaagtggcggcagtctttcgaatcatatcttaagaccatgccaccttattacctcggaccgttgaaaaaggccgtacggatgatgggtgctcctaatctgatcgctgactctatggagtatggattgagctattctgtgatatcctacctaaaaaaacttagccagcaggccaagatcgagagcgaccgtgtgattgggtcggtggggaaaaaagtggtacaagagactggcatcaaggtgcgatcccggtctcacgggctgagtatggcctatcggaaggacttccagcagctacttcaggggattagtgaagacgtgcctcatcgcctattggatctgaatatgaaagagtatacaggcttccaggtcgcactgctgaataaggatctgaagccgcagactttcaggaacgcttatgacataccacggagaaacttgctggaccacctcactaggatgagaagtaatttgctgaaaagcacacgtcggttcttgaaaggacaggacgaggaccaggttcattctgtgcccattgctcaaatgggcaactatcaagagtatttgaagcaagtgccaagcccgctcagagagctcgaccctgaccagccacgcagactgcacacttttgggaacccctttaagctcgacaagaagggcatgatgattgacgaggcagacgagttcgtcgcgggtccccagaataagcataagcggcctggcgagccaaatatgcaggggatcccgaagcggaggagatgcatgtcccctctgctgcgcggaagacaacagaaccccgtggtgaataatcacatcggagggaaaggaccccctgccccaaccacccaggcgcaacctgacttaatcaagccattgccgctgcacaaaatttccgaaaccactaatgattccataatccacgatgtggttgagaatcacgttgcagaccagctttcaagcgacattacccccaatgcaatggacaccgagttttcagcctcgtcacccgcttctttacttgagagaccaaccaatcacatggaagccctcggccatgatcatctggggacaaacgacctcacggttggtgggttcctggaaaaccacgaagagcctagggataaagaacagtgcgcggaagagaatatacccgcttcaagcctgaataagggtaaaaagctaatgcattgcagaagccatgaggaggttaatactgaattgaaggctcagataatgaaagagatccggaagcctggaaggaaatatgagagaatttttactctgttaaagcatgttcaggggagcctccagactcggcttattttcctgcaaaatgtcataaaggaggcatctcggtttaaaaaaaggatgctgattgagcagctggagaacttcctggatgagattcatcgtcgggctaatcagattaatcatatcaattccaactag

SEQ ID NO: 30913 - DNA, 387 bp, synthetic construct
  source 1..387: mol_type = other DNA; note = Synthetic coding sequence
atggccagcagcaatactgtgcttatgcggcttgtggcttcggcatattctattgcccagaaagcagggatgatagtgagaagagtgattgcggaaggagatttgggtattgttgaaaagacatgtgccacagatctgcagacaaaggccgatcgcctggcccagatgagtatttgcagctcactagcccgaaaatttcccaagctcacaatcatcggcgaagaagatctgcctagtgaggaagttgatcaggagctgatcgaagacagccagtgggaggaaattctgaaacagccctgccctagtcagtactccgctataaaggaagaagatttggtcgtgtgggtcgacccactcgacggcacaaaagaatacactgaggggtag

SEQ ID NO: 30914 - DNA, 237 bp, synthetic construct
  source 1..237: mol_type = other DNA; note = Synthetic coding sequence
atgcgctttatgatgatgagggcagaaaattttttcatattaaggcgaaaacccgtggagggctatgatatctctttcctcattacaaactttcacacagagcagatgtataaacacaagttagtggatttcgtgatccacttcatggaggagattgacaaagagatatcagagatgaaactgtccgtgaacgccagagcacggatagtcgctgaagaattcctgaagaacttctag

SEQ ID NO: 30915 - DNA, 171 bp, synthetic construct
  source 1..171: mol_type = other DNA; note = Synthetic coding sequence
atggttatggaaaagccatcccctctactcgttggcagagagttcgtgagacagtactacacgctgctcaacaaggccccagagtacctgcatcgattctacggacggaatagcagttacgtacacgggggagtagacgcctcaggcaaaccacaggaggctgtttattag

SEQ ID NO: 30916 - DNA, 357 bp, synthetic construct
  source 1..357: mol_type = other DNA; note = Synthetic coding sequence
atgaagatttttgtaggcaatgtggatggcgcagacaccacccctgaggaactggctgctttgttcgccccttacggcaccgtcatgagctgcgcagtaatgaagcaattcgccttcgtccacatgcgggagaacgcaggggcattgcgagcaattgaagccctgcacgggcacgaactgcgacccggaagggctttggtcgtggagatgtcgaggcccaggcctctgaacacatggaaaatctttgtcggcaatgtatccgccgcatgtacatcccaggaactgcgctcgctctttgagaggagaggcagagtaattgagtgcgacgtggtgaaaggaggaatgtgcgtcggatag

SEQ ID NO: 30917 - DNA, 438 bp, synthetic construct
  source 1..438: mol_type = other DNA; note = Synthetic coding sequence
atgtcgtcgcccagggatttccgagccgagccggtgaatgactatgaaggcaatgatagtgaggccgaagacctaaattttagagaaacactccctagtagcagtcaggagaatacgcccagatccaaggtgttcgagaacaaggtgaacagcgaaaaggtgaagctatccctaagaaacttcccccacaatgactacgaagacgtgtttgaggagccttccgaaagtggctccgacccatctatgtggacagccagaggacctttccgtcgggatagatggtccagtgaggatgaggaagcggcaggcccaagtcaggccctgagtcccctcctgagtgtccagcaccatggatatagcggacccaatgagagaacaactttttggcacgggagcaatgagggcgcagtatcgcttttgttgagatattgcgcatag

SEQ ID NO: 30918 - DNA, 438 bp, synthetic construct
  source 1..438: mol_type = other DNA; note = Synthetic coding sequence
atgtggacagcacgcggaccttttaggagagatcgatggagctcagaggacgaagaggcggctggcccatcacaagctctgagcccccttctgtccgacactcgcaagatcgtgtctgaaggagagctggaccagctggcacagatacgcccattaattttcaactttcacgagcaaactgcgataaaagattgtctcaagattctggaggagaagactgcagcttatgacatcatgcaagagttcatggctctagaactgaaaaacctgccaggcgaattcaactccggcaatcagccaagcaatcgcgagaaaaaccgctatcgagatattcttcccttccagcatcacggatactccgggccaaacgagcgtactacattttggcacggatcaaacgagggcgctgtgagcctcctcctcaggtactgtgcctag

SEQ ID NO: 30919 - DNA, 444 bp, synthetic construct
  source 1..444: mol_type = other DNA; note = Synthetic coding sequence
atgtggaagtttcctgggggattatctgagccagaggaggatattggagacacagccgtgcgggaggtgtttgaagagacggggattaagtcggaattcagaagtgtgctaagtatccggcaacagcacaccaatcctggtgccttcggtaaaagtgacatgtacattatatgccgactgaagccctattccttcacgatcaatttctgtcaggaggaatgtctcagatgtgagtggatggacttgaatgacttagccaagactgagaacactactccaatcaccagccgggtggcgagactgctgctttatgggtatagggagggcttcgataagatcgacctgaccgttgaagagctgcctgctgtttataccggcctcttctataagctttaccataaagaactgcccgaaaattacaagactatgaagggaattgactag

SEQ ID NO: 30920 - DNA, 300 bp, synthetic construct
  source 1..300: mol_type = other DNA; note = Synthetic coding sequence
atggacgagtcagctctgcttgacttgcttgaatgcccagtctgcctcgagaggcttgatgcgagcgccaaagtgctgccgtgccagcacacattttgtaagaggtgcctgctcgggatcgtgggttcaaggaacgagctgaggtgccccgaatgtagaactcttgtaggcagcggcgttgaagagctgccgtcaaacatactcctggttcggctattagatggcattaaacagcggccatggaaaccaggcccaggtgggggatcaggtaccaactgtactaatgcactcaggtcttag

SEQ ID NO: 30921 - DNA, 3675 bp, synthetic construct
  source 1..3675: mol_type = other DNA; note = Synthetic coding sequence
atggccctgcgaccaggggctgggagcggtggtggcggtgcagccggagccggagctggtagcgccggaggcggtggctttatgtttccagttgctgggggtattagaccaccccaagctgggctaatgccgatgcagcagcaagggtttccgatggtaagtgtgatgcagcccaatatgcaagggatcatgggcatgaactattcctctcaaatgagtcagggcccaattgcgatgcaggccggaatccccatgggtccgatgccagccgctggcatgccttatctgggccaggcgcctttcctcggaatgagaccacccggaccccaatatactccggacatgcagaaacagttcgctgaggaacagcagaagaggtttgagcagcagcaaaaactcctcgaagaagaacggaagcggaggcagtttgaggagcagaagcagaaactgcgccttttgtcgtccgtaaaacctaagacgggggagaagtccagagacgacgcattggaagccattaaaggcaacctggacgggttctctcgcgacgccaagatgcaccccaccccggcatcacacccaaaaaaacccggtgtcggggtgtttcctagtcaggatcctgcccagcctcggatgccaccatggatttataatgaaagcctggtgccggatgcctataagaaaatcttggagaccaccatgactccaacggggattgacacagcaaagctttatcccattctcatgtccagcggcctgccgagggagacattgggccagatttgggctctcgccaaccgcacaacccccggaaaactaaccaaagaggagctatatactgtccttgccatgattgccgttacccagcgcggtgtgccagcaatgtcaccggacgccctgaatcagttccccgcagccccaatcccaaccctgtccgggttcagcatgaccctgcctaccccagtgagccagccaactgttatcccgtccggccctgccggtagtatgcctctctcgctcggtcagcccgtgatgggaatcaacctggtgggaccagtaggtggggctgctgcacaggcctcttcggggttcatacccacctatcccgctaaccaagtcgtaaaaccagaagaggatgatttccaagactttcaggatgccagtaagtctgggagcctcgacgatagcttcagcgactttcaggagcttccagcctccagcaagactagcaactcacaacatggaaactctgcccctagtctcttaatgcccctgccaggtactaaagcgctgccatcaatggataagtacgcagtgttcaagggcattgcagcagacaaatccagcgaaaacaccgtgccaccaggagatcctggcgacaagtactctgcttttagggagttggaacagacagccgaaaataagccactgggcgagtcattcgctgagtttagaagtgccggaaccgacgatggtttcactgatttcaagactgcagactccgtaagccccctggagcctcctaccaaggataagacatttccaccgagtttcccttctgggacaattcaacagaaacaacagacacaggtgaagaaccccctgaatctggcagacctggatatgtttagcagcgtgaattgcagttcagagaagccactctccttttctgccgtgttttccacaagcaagtcggtgagcactccgcagagcacaggctcagctgccacaatgacagcactggccgctaccaagactagctcgctcgccgacgactttggcgagttcagtctgtttggcgagtacagtgggttggccccagtgggtgaacaggatgattttgcggactttatggccttttcaaacagcagcatctcatctgagcaaaaaccagatgataagtacgatgctctgaaagaagaggcctctcctgtgccattgaccagcaacgttggttctacagttaaaggcggacagaactctacagccgcttccacgaagtacgacgtatttcgacagctgtccctcgaaggaagtggactcggagttgaagatctcaaagacaataccccaagtggcaaatctgatgatgactttgccgacttccactcctcaaaattttcatcgattaacagtgacaaaagtctgggagaaaaggccgtggcctttcggcatactaaggaggactctgcctcagtgaagtcactcgacctgccctccatcggcggaagctccgtgggtaaagaagatagcgaagatgccctatctgtccaatttgatatgaagttggctgacgtcggcggtgacctgaaacatgtgatgtccgactccagcttggacttgcccacagtaagtggccagcacccccctgcagctgacatcgaagacctcaaatacgccgctttcggatcctacagctctaacttcgccgtttcaactctgactagctatgactggagcgaccgcgatgatgcaactcagggcagaaaactgtccccttttgtgttgtcagctggaagcggcagcccttctgcaacctcgatcttacaaaagaaggaaacatcctttggctcctctgagaatatcacgatgacctctctgagcaaagtgacgacgtttgtgagtgaagatgccctgccggagactaccttccccgctttagcatcttttaaagatacgattccccagacaagtgaacagaaggagtacgaaaatagagattataaggacttcaccaaacaagaccttcccacagccgaaaggtcccaggaggccacctgcccttctccagccagcagcggcgctagtcaggagactcctaacgagtgtagtgacgattttggcgaattccaatccgagaagcccaaaatcagcaaatttgacttcctggttgctacctctcaatcgaagatgaagagctcggaagaaatgataaagagcgagttggccacattcgacttgagtgttcaagggtcgcataaacggtcgcttagcttaggagacaaagaaatctctcggtcctctcccagtcccgctctggaacaacccttccgggaccgatccaacaccctcaacgagaaacccgcactgcccgttatacgcgataaatataaagatcttacaggcgaggtagaggaaaatgagcgttatgcttacgaatggcagagatgcctggggtcagccctgaacgtcattaaaaaggctaacgacacccttaatggcatttcttctagtagtgtgtgcactgaggttattcaaagcgcacaggggatggagtacctgctgggcgtggttgaggtgtacagggtcactaagagagtcgagcttggcatcaaagctacggcagtttgttctgagaaattgcagcaactgctgaaggatatcgacaaagtatggaataacttaatcggcttcatgagtctggccacccttacccctgacgagaattctctggatttcagtagttgtatgctccgcccaggtattaaaaatgcccaggagctggcctgcggtgtttgccttctgaacgtggatagtcgcagtcgggctttcaattctgaaaccgacagcttcaagctggcatatggcggacaccaataccacgcatcctgtgcaaacttctggataaactgcgtggaacctaagccgccaggcctggtcctgccagacttattgtag

SEQ ID NO: 30922 - DNA, 354 bp, synthetic construct
  source 1..354: mol_type = other DNA; note = Synthetic coding sequence
atggtccaacgtctcacttaccgccgtcggctgtcttataacactgcgtccaacaaaactcggcttagcagaacacccggaaatcggattgtgtatctgtacacgaagaaagtgggcaaggcgcctaagtcagcgtgtggagtatgtcctggaagactgagaggagtgcgggcagtgaggcctaaggtgctgatgaggctcagcaaaacgaaaaagcatgtttctcgagcctatggcggaagcatgtgtgccaagtgtgtccgggacaggattaaaagggctttcctcatcgaggaacagaaaattgtagtgaaggtgctgaaggcccaggcccagtctcagaaggccaagtag

SEQ ID NO: 30923 - DNA, 621 bp, synthetic construct
  source 1..621: mol_type = other DNA; note = Synthetic coding sequence
atgtcctcacccagagacttccgcgcagagccggttaatgattacgaaggcaacgacagtgaagccgaggatttgaattttcgggagactcttccaagttcctcccaggaaaataccccccgaagcaaagtgtttgagaacaaagtgaatagtgagaaggttaagctttccctgcgtaacttcccacacaatgactatgaggatgtgtttgaggaaccttctgagagcgggagcgatcctagtatgtggacagccaggggccctttcaggagagaccgctggagtagtgaggacgaagaggccgctgggccttcccaggccttgtctcccctcctatcagacacgagaaagattgtgagcgagggggagctggaccagctcgcccagatacgaccactgatattcaatttccacgagcagacggctattaaggactgtctgaagatcctggaggagaagactgctgcttacgacattatgcaggaattcatgttcaacataatggatatcgtagcccagatgagagaacagagatcaggaatggtccaaacaaaagaacagtatcacttttgctacgatatagtgttggaggtcctgcgaaaattgttgaccctcgattag

SEQ ID NO: 30924 - DNA, 582 bp, synthetic construct
  source 1..582: mol_type = other DNA; note = Synthetic coding sequence
atggaggagacaataaaagaccctcctacatccgccgttctcctggaccactgtcatttctctcaggtgattttcaattcagtggaaaaattttacatccccggtggggatgttacctgtcattataccttcacccagcacttcataccacggcgaaaggattggattgggatctttcgagtaggctggaagaccacccgagagtactacacattcatgtgggtgacactccccattgatctaaataacaaaagtgccaagcaacaggaggtgcaattcaaggcctactacttaccaaaggacgacgagtactaccagttttgctacgtggatgaagatggcgtggtccgcggagcgtctattccatttcagttccgcccagaaaacgaagaggacattctggtggttactacccagggagaagtggaagagatcgagcagcacaataaagagctgtgtaaagagaaccaagaactgaaggacagttgtatctccctgcagaagcagaattctgacatgcaggctgagcttcaaaagaaacaggaggaattggaaacactgcagtctattaacaaaaaatag

SEQ ID NO: 30925 - DNA, 156 bp, synthetic construct
  source 1..156: mol_type = other DNA; note = Synthetic coding sequence
atggactttttttctagtcatctgttggcagattccagtagccctgccacaaacagctcgcacactgatgcacacgagatcctggtaagtgattttcttgtgtccgacgagaacctccagaaaatggaaaatgtcttggatttatggagcagctag

SEQ ID NO: 30926 - DNA, 513 bp, synthetic construct
  source 1..513: mol_type = other DNA; note = Synthetic coding sequence
atgagttccaacgaatgctttaaatgcggcaggagtggccactgggctcgcgagtgtcccacaggcggtgggagaggaaggggtatgagatcgcgcggaaggggctttcaattcgttagttccagccttccagacatatgctatagatgtggagagtccggtcacttggcgaaggattgtgacctgcaagaggatgcttgttataattgtgggaggggcggacacatcgccaaagattgcaaggaacccaagagggagcgcgaacagtgctgttacaactgcggcaagcccggtcacttagctcgcgattgcgatcatgcagatgaacaaaagtgttattcctgcggggagtttgggcacatccagaaagattgtaccaaggtgaaatgttatcgctgcggcgaaacagggcatgtcgccattaactgctccaaaacctccgaggtgaactgctacaggtgcggagaatcaggtcacctggcacgggagtgtactatcgaagcaacagcatag

SEQ ID NO: 30927 - DNA, 399 bp, synthetic construct
  source 1..399: mol_type = other DNA; note = Synthetic coding sequence
atgaaccaagaggacttggaccctgattccaccaccgatgtgggggacgttacaaacacagaggaagagcttatcagagagtgtgaggaaatgtggaaggatatggaagaatgtcaaaacaagctaagtctcatcggtacggaaaccctaaccgatagtaacgctcagctgtcccttctcatcatgcaagtcaaatgtctcaccgcagagctatcccagtggcaaaagaagactcccgaaacaatcccattgactgaggatgtactgattaccttgggaaaagaggaatttcagaaactgagacaagatttggagatggtgctctcaaccaaggaatccaagaacgaaaagctgaaggaggacttagagagagaacagaggtggctcgacgagcagtag

SEQ ID NO: 30928 - DNA, 1095 bp, synthetic construct
  source 1..1095: mol_type = other DNA; note = Synthetic coding sequence
atggtcaaattgtttattgggaatttgccgagagaggcaacagaacaggagatccgatctctgttcgagcaatatggaaaggtattagagtgcgacataatcaaaaattatggttttgtgcacattgaagataaaactgcggcagaagacgcaatcaggaacttacaccactacaagctgcatggcgtgaatatcaatgtggaagccagtaagaacaagagtaagacctccaccaagctgcatgtaggtaatatttccccaacctgcacaaataaggagctgagggcaaagttcgaggagtatggaccagtgattgaatgcgatatcgtgaaagactacgcctttgttcacatggagagagcagaggacgctgttgaagctatacggggattagacaacactgagtttcaagggaagcgaatgcacgtacaattatccacaagtagattgaggaccgccccagggatgggcgatcagtccggctgttatcgctgtgggaaagaaggacactggtctaaagagtgcccgatcgataggagcgggagggtggcagacctcactgaacaatacaacgaacagtacggcgctgtacgtacgccatacaccatgtcttacggagattctctgtattataacaatgcctacggtgctttagacgcctattacaagcggtgtagagcggctcggtcttacgaggccgtggccgctgccgcagctagcgtgtataattacgcagaacagacactcagccagctgccgcaggtccagaatactgcaatggctagtcacctgacttctacgtcccttgacccttatgacaggcacctactccccacatcaggggctgccgctacagctgctgctgccgcagctgccgctgcggctgtcaccgcagccagcactagttactacggcagggacaggtcacctctgcgcagagccactgccccagtcccaaccgtaggggaaggctatggatatggacatgaatccgagctgagtcaggcctccgccgcagcccgaaattcattatacgatatggccagatacgagagggagcaatacgccgacagggcaaggtacagtgcattctag

SEQ ID NO: 30929 - DNA, 420 bp, synthetic construct
  source 1..420: mol_type = other DNA; note = Synthetic coding sequence
atggcgacaggagacctcaagagatccctgaggaacctggagcaggtacttagactgctcaactacccagaagaagtagactgcgtcggcctgataaaaggcgacccagcagcaagcctgcccatcatatcgtactcatttacttcatattccccgtatgtaacggaactcattatggagagtaacgttgagctgattgccaagaatgaccttagatttatagacgcagtctacaagcttttgcgggaccagttcaattacaaacccatactgactaaaaaacagttcattcagtgcggattcgcagaatggaaaatccagattgtttgtgatatacttaactgtgtcatgaagaagcataaagaactgtcaagcctgcagaaaatcccttcccagcagcgtaagaagatctcaagttag

SEQ ID NO: 30930 - DNA, 450 bp, synthetic construct
  source 1..450: mol_type = other DNA; note = Synthetic coding sequence
atggccaacattgccgtacagcggataaaacgcgagttcaaagaggtgctgaagtccgaagaggttcgcttcatcacaaagatttggcacccgaatatctcttctgtaaccggtgcgatttgtttggatattctgaaggaccaatgggcagctgcgatgaccctcagaacagtacttctgtctctgcaggctctgctggccgcagccgagccagatgaccctcaggatgcagtggtcgcgaaccagtataaacaaaaccctgagatgtttaagcagactgcaagactctgggcacatgtgtacgccggagctccagtaagttctccagagtatacaaaaaaaatagagaacctgtgcgccatgggtttcgaccgcaacgcagtgatcgttgcgttatcaagcaaatcctgggacgtggagacggccacggaattgctgctgtctaactag

SEQ ID NO: 30931 - DNA, 597 bp, synthetic construct
  source 1..597: mol_type = other DNA; note = Synthetic coding sequence
atggtcatggaaaagccaagtcccctgctggtcggtcgggaatttgttcgccaatactacacattgctcaacaaggcgcctgaatatcttcacagattctatgggagaaactcgtcctacgtccatggcggagtggatgcgtcaggaaagcctcaagaagcagtatatgggcagaacgacatacaccataaggtcctgagtctgaatttttcagagtgtcatactaagatccgccatgtagatgcacacgccaccttatcggacggagtggtcgtccaggtgatggggctactctcaaattctggccagcctgagagaaagttcatgcagaccttcgttttagcaccagagggatcagtacccaacaaattttatgtccataacgatatgtttagatacgaggatgaagtattcggggatagcgagccggaattggacgaggagtcggaagacgaggtagaggaagagcaagaggagagacagcctagtccggaacccgtccaggagaacgcaaactcaggctactacgaagcccaccccgtgacgaatgggatcgaggaacccttggaggagtcctcacacgaaccagagccttag

SEQ ID NO: 30932 - DNA, 150 bp, synthetic construct
  source 1..150: mol_type = other DNA; note = Synthetic coding sequence
atgatgcttggcaccgagggaggagaaggatttgtggtcaaggtcagagggcttccttggtcttgttccgcagatgaggtacagcggttctttagcgactgcaaaatccaaaatggagcacagggcatccggtttatctatactcgttag

SEQ ID NO: 30933 - DNA, 1266 bp, synthetic construct
  source 1..1266: mol_type = other DNA; note = Synthetic coding sequence
atgatggaggacaacaaacagctcgccctgcgcatagatggagccgttcagtccgccagccaagaagtgaccaatctgcgagcagaactcactgccaccaatcggaggcttgcagaactttcaggaggcggagggccagggcctgggccaggcgcagccgcaagcgccagtgctgccggtgacagcgctgccacaaacatggagaatccccagctgggcgctcaagtgctactgcgcgaggaggtgagtagactgcaagaggaggtccacctgctacggcagatgaaggagatgctggctaaagatctggaggagtcccaaggcggaaagagtagcgaggtgttatccgcaacagagctgagagtgcagctcgcccagaaggagcaggagctagcgcgtgcaaaggaggcgctacaagcgatgaaggctgataggaaacgactgaagggtgaaaagacagatctggtatcacaaatgcagcaattgtacgctaccttggaatctcgggaggaacagcttagagatttcatcagaaactacgagcagcacaggaaggagtcagaggatgctgtgaaagctctggccaaggagaaagacctcctagaaagagaaaagtgggagctcaggaggcaggcaaaggaggccaccgatcacgccaccgccctgagatcccaacttgacctcaaagataaccggatgaaagagcttgaggccgagctcgccatggctaagcagtccctggcgacattaactaaggatgttcccaaacggcatagcctggctatgccaggcgaaacggtattaaatggaaaccaggagtgggtggtgcaagccgacctgcctctgactgctgctattaggcaaagtcagcaaacactttatcatagccaccctccgcaccctgcagaccgacaggctgttcgtgtctctccctgtcactctcggcagccgtctgtgatcagtgatgcatccgctgctgagggggaccggagctctacaccaagtgatattaactctccacgccatcggacccactcgttgtgtaacggagactccccaggacccgttcaaaagaatctgcataaccctatagtgcagagcctagaggaccttgaggatcaaaaacgtaaaaagaaaaaagaaaaaatgggcttcggctctatatccagggtattcgctcggggaaagcagagaaaaagtctggaccccggactgtttgacggaacagccccagactattacattgaggaagacgctgactggtag

SEQ ID NO: 30934 - DNA, 1173 bp, synthetic construct
  source 1..1173: mol_type = other DNA; note = Synthetic coding sequence
atggcaacaggcgacctgaaacggtcattgcgcaatttagaacaggtcttaagactcctgaattatcctgaagaagttgactgcgtgggactcataaagggcgatcccgctgcctcgcttcccataattagttattctttcacgtcttactctccctatgtgactgaactgattatggagagcaatgttgagctaatagccaaaaacgacttgagattcattgatgccgtctacaaactgctccgagaccagttcaactacaagcccattctcactaagaagcagttcatccagtgcgggttcgcagaatggaagatccaaattgtgtgcgacattctcaactgtgtgatgaagaagcacaaggaactttcttctctgcagaaaatccctagtcaacagagaaaaaaaattagttctgggaagtctgaaccgccacttgggaacgagaaaatctcggcagaggccgtgggcgtcgacattagtggtcgattcatgaccagtgggaaaaaaaaggctgtcgttatccgacacttatataatgaagataacgtggatatcagcgaagacaccttaagcccaattacagatgtgaatgaagccgtggacgtttctgaccttaacgctaccgagatcaaaatgcctgaagtgaaggtcccagaaatcaaggccgagcagcaagatgtgaacgtcaatccagaaattactgccctacagacaatgctagccgaatgccaggagaacttaaagaagctgaccagcattgaaaaacgactagactgcctcgagcagaaaatgaaaggcaaggtaatggttgatgagaacacctggactaatctgttatcccgagttactctcctggagactgagatgctactctccaagaaaaacgatgaattcatcgaatttaacgaagtctctgaggactacgcttcgtgttccgacatggacttgcttaatccccacaggaagagcgaggtggagaggcctgcttccattccactatcgtccggctattctactgcttccagcgattcaactccaagggcctctaccgttaattactgcggactgaacgagatctctgaggagactaccatccagaaaatggagaggatgaaaaagatgttcgaggaaacagccgaactcctgaagtgtcctaaccactatctgtag

SEQ ID NO: 30935 - DNA, 390 bp, synthetic construct
  source 1..390: mol_type = other DNA; note = Synthetic coding sequence
atgaagcgcggtagactgcctagttccagcgaagatagcgacgacaacggctcactttcgacgacctggtcccagaactcacgatcccagcacagaagatcttcgtgttctcggcatgaagatcgcaagccaagcgaagtgttcagaactgatctgataaccgcaatgaaacttcacgattcttaccagctgaaccccgatgagtactatgttctcgcagacccttggcggcaggagtgggaaaagggagtgcaggtgcctgtctcccctggcaccattccccaacccgtcgcgagagtcgtgtctgaggaaaagagcctgatgttcattagacccaagaagtatatagtctcttccggctcagagccccctgagctcggatatgtgtag

SEQ ID NO: 30936 - DNA, 489 bp, synthetic construct
  source 1..489: mol_type = other DNA; note = Synthetic coding sequence
atggactttttcagctcccacctcctcgcggatagcagctcacctgcgacgaactctagtcacaccgacgcacatgagatcctagtgagtgattttctcgtaagtgatgagaacctacagaagatggagaatgtgctcgacctctggtcctccggcctaaaaacaaatatcatctctgaactctcgaagtggcggctgaacttcatcgactggcaccgcatggagatgagaaaagagaaagaaaagcacgccgcacacttaaagcagctgtgcaatcagatcaatgaactcaaggagctgcagaaaaccttcgagatatccattgggaggaaggatgaggtcatttcttcattgtcacatgcaattggtaagcaaaaggagaagatagagctcatgcgcaccttctttcattggcgaattggacatgtccgggctagacaggacgtgtatgaaggaaagttggcagatcaatattatcaaaggacgtag

SEQ ID NO: 30937 - DNA, 411 bp, synthetic construct
  source 1..411: mol_type = other DNA; note = Synthetic coding sequence
atgattgtgaacgattacgaggggaacgatagtgaagctgaagacttaaacttcagagagactctgccgtcttccagccaggagaatacgccacgtagcaaagtgtttgaaaacaaggtgaactctgaaaaagttaagctaagtcttcgcaactttccgcacaacgactacgaagatgtgtttgaagaaccctcggagagcggatctgacccctccatgtggacagcaagaggtcctttcaggcgcgaccgttggtcatcagaggacgaagaagcagctggaccctctcaggccctttccccactgctgtccgttcagcaccatggatattctggaccaaatgagaggacaaccttttggcacggatctaatgagggagcagtgtccctgcttctgcgatactgcgcctag

SEQ ID NO: 30938 - DNA, 321 bp, synthetic construct
  source 1..321: mol_type = other DNA; note = Synthetic coding sequence
atggcctcccagctccaggtgttcagccccccaagcgtctcctcatcagctttctgctccgcaaagaagctcaagatcgaaccatctggctgggatgtctctgggcagtcaagtaatgacaaatattacactcattctaagactcttccagctacgcagggacaagctaacagttctcaccaggtggccaatttcaacattcccgcatacgaccagggcttgctgctgcctgcgcctgctgttgagcacatcgtggtaacagctgcggatagtagcgggtcagccgcaacttctacgttccaatcaagccaaaccctttag

SEQ ID NO: 30939 - DNA, 411 bp, synthetic construct
  source 1..411: mol_type = other DNA; note = Synthetic coding sequence
atgaaacgcggaagactcccatctagcagcgaagatagcgacgacaacggatcactcagtacaacatggtcgcagaactcccggtctcagcaccggcgttcctcttgttcgcggcacgaagatagaaagccctctgaggtttttcggacagacttgataacggcgatgaagcttcatgattcttaccaactgaaccctgacgagtactatgtgctagccgacccttggaggcaagaatgggagaaaggtgtgcaggttccagtgtcccccggaacaataccacagcctgtggcccgagttgtgagtgaggagaagagcctgatgtttatacggccaaagaagtatatagtatccagtgggtcggagcctccagagcttgggtacgtagatattcggactctagcggattag

SEQ ID NO: 30940 - DNA, 396 bp, synthetic construct
  source 1..396: mol_type = other DNA; note = Synthetic coding sequence
atggaggacggcactcccaagcacattatccaaatgacagggttcaaaatggaagagaaggaagcacttgtgaagctactcctcaaacttgactgtaccttcattaaatcagaaaagtacaaaaattgtacacacctgattgcagagagactatgtaagagcgagaagtttctagcagcctgtgcggcaggcaaatggatccttacaaaggactacataatccatagcgccaagagtggacgttggctcgacgagacgacttacgagtggggatataagatcgagaaagatagtcggtacagcccccagatgcagtctgctccaaagcgctggcgggaagagcttaaacgtaccggcgctcctggagctttccaccggtggaaagtagttctttag

SEQ ID NO: 30941 - DNA, 1668 bp, synthetic construct
  source 1..1668: mol_type = other DNA; note = Synthetic coding sequence
atgcgcctgattggaatgcctaaggagaagtatgaccccccagacccccgtcgcatttacactattatgagtgcagaggaagttgccaatggaaaaaaatctcactgggcagaactggaaatcagtggcagggtgagatcgctgagtacgagcctgtggtctctcacacacttaaccgcgctgcaccttaacgataattacctgtctaggataccaccagatatcgctaaactgcataatttggtatatctggacctgtcatccaacaagcttcgaagccttcccgcagagttggggaatatggtttcactgagagagttactgttaaacaataacctcctcagagtcctgccatacgagctgggacggctgttccagttgcaaactctggggctcaagggcaacccactgtcacaggacatcctgaacttatatcaggacccagatggcacccgaaaattactgaatttcatgctagataatctcgccgtccatcctgaacaacttcctcctcgaccgtggatcacgctaaaggagcgggaccagatcttgcccagcgcaagctttactgtcatgtgctacaacgtgctttgcgacaaatacgctacccgccagctgtacggatactgtccctcttgggccctgaattgggaatacagaaaaaagggtatcatggaagaaatcgtgaattgtgacgcagacattatatccttgcaggaggtcgaaaccgagcagtacttcaccctctttctcccagctctgaaagaacgaggatacgatggcttctttagcccaaaatcacgcgctaagatcatgtcggagcaagaaagaaaacacgtggacggatgcgctatcttctttaaaactgaaaagtttacactcgttcagaagcatacggttgagtttaatcaggtcgcgatggctaacagcgatggatctgaagccatgctgaatcgggtgatgaccaaggacaacataggtgtggcggtggtcctcgaggtgcacaaagagctcttcggagctggcatgaagccaatccacgccgctgataagcagctgctgatagtggcaaacgcccatatgcattgggacccagagtacagcgacgttaaactcatccaaacgatgatgtttgtttcagaggtgaaaaatatcctcgaaaaggcaagcagtagacccggatcccctaccgccgacccaaattccattccgttggtcctctgcgctgatcttaattctctgcctgacagtggagtagtcgaatacttgagtaacgggggagtggcagacaatcacaaggattttaaagaacttcggtacaatgagtgcttaatgaactttagttgtaacggcaaaaatggctcaagcgaggggaggatcacacatgggtttcaactgaagtctgcatatgagaacaacctcatgccctacacaaactatacttttgatttcaagggagtaatcgattatatattctactcaaagactcatatgaatgtgctcggtgtgctggggcctttggatccccagtggctcgtggagaataatattacaggttgcccacatccgcatatcccgtcagaccacttttccctcttgactcaattggagctccaccctcctttgctccccttggttaatggagtccacctgccgaataggaggtag

SEQ ID NO: 30942 - DNA, 1635 bp, synthetic construct
  source 1..1635: mol_type = other DNA; note = Synthetic coding sequence
atgaataccagcatcccttaccagcagaacccttataacccacgcggatcgagtaacgtgattcagtgttaccgctgtggtgatacctgtaaaggagaggtggtccgggtgcacaataaccacttccatattcgttgctttacatgtcaggtgtgtggctgtgggctggctcagagcgggttcttcttcaagaatcaagaatacatttgcacccaagactatcagcagctgtatgggacgcgctgtgatagctgcagagatttcattacaggtgaggtcataagcgccttaggcagaacttatcatccaaagtgtttcgtctgttctttgtgcagaaagccttttcccatcggggataaagtgacgttttccggtaaggagtgtgtctgtcagacctgctctcagagtatggctagttccaagccaattaagataagaggcccaagccactgcgccggttgtaaagaagagattaagcatggacaaagtctgttggcattagacaagcaatggcatgtgagttgcttcaagtgtcagacatgctcagtgattttaaccggcgagtacatcagcaaagacggggttccttattgtgaaagtgactatcatgcacaatttggaatcaaatgcgaaacatgtgatcgatatatcagcggtagagtactggaggcaggcggtaaacattatcatcccacatgcgccaggtgcgtgaggtgtcatcagatgttcacagaaggggaggagatgtacttgacaggttccgaagtatggcaccctatctgtaaacaggctgctagagccgaaaaaaaattaaaacaccggaggacctccgaaacatcaatctccccgcctggctccagcatcgggtctccaaatcgcgtcatctgcgatatttatgagaatttagatttaagacagaggagggcctcgagtccagggtatatcgactctccaacttactctcgccagggaatgagccccactttttcccgctccccccaccactactatcgaagcggtgacctttctactgctactaagagcaaaacttccgaggacatctctcagactagtaagtattcccccatctattcccctgacccctactacgcaagcgaaagcgagtactggacttaccatggtagccctaaggtgccacgcgctagaaggttttcttccggcggagaggaagatgattttgaccgatccatgcataaacttcaaagcggcatcgggcgattgatcctaaaagaagagatgaaagcccgatcgtctagctatgcagatccttggactcctcctaggagttctaccagtagtagagaggctttgcacacggctgggtatgaaatgtctctcaatgggtcccctcgatcccactacctggcagactccgaccccctgatcagtaagagcgcttcactccccgcttatcgtagaaatgggcttcacaggactccgtcagctgatcttttccattatgattcgatgaatgcggttaactggggtatgagagagtacaaaatatatccctatgagctcctgctggtgaccacccgagggcgtaacaggctgcctaaggatgtggatcggactaggctcgaagggaacttttggaaatccggctgcctctag

SEQ ID NO: 30943 - DNA, 393 bp, synthetic construct
  source 1..393: mol_type = other DNA; note = Synthetic coding sequence
atggggcgtctggatggaaaggtgattatactaactgctgccgcacagggaatcggtcaggctgctgcactggcatttgcaagagaaggggcaaaagttatcgctacagacatcaatgaaagcaaactacaagaactggagaagtatcctggcatccaaaccagggtgctcgacgtgactaaaaaaaaacaaattgaccagtttgctaatgaggtcgagcggctggacgtactgttcaatgtggcgggatttgttcaccacggcaccgtgctggattgcgaagagaaagattgggatttttcgatgaacctgaacgtgaggtctatgtatcttatgattaaagctttcctcccgaagatgttggcacagaaatccggaaatattattaattag

SEQ ID NO: 30944 - DNA, 1119 bp, synthetic construct
  source 1..1119: mol_type = other DNA; note = Synthetic coding sequence
atgcagggcccagccggaaacgcttccagagggcttccgggtggtcccccaagcaccgtcgcttccggggctgggagatgcgagtctggtgccctcatgcactcgtttgggatctttcttcaagggctgctgggcgtagtcgctttcagcaccctgatgctgaagagattccgcgaacctaagcacgagagacggccatggcggatctggttcctcgacacctcgaagcaagctatcggcatgctgtttatccacttcgccaacgtgtacctggccgacctcaccgaagaggacccttgctcgctctatctgatcaattttctacttgacgcaacagtaggtatgctgctgatatatgtcggcgtcagagccgtgagcgttctggttgaatggcaacagtgggaatcattacggtttggggaatacggcgacccgcttcagtgcggagcatgggttggtcagtgcgctctgtacattgtgattatgatcttcgagaagagcgtggtctttattgtcctgctcatcctgcaatggaaaaaagtggcacttctgaatcccatcgaaaaccctgatttgaagcttgccatcgtaatgctaattgttccgtttttcgtgaacgccctcatgttctgggttgtcgacaatttcttaatgcgtaagggcaagaccaaagctaagctggaagagcgcggagctaatcaggacagcagaaatggctcaaaggtgcgctaccgcagagcggcatctcatgaagagtccgagtctgaaattctgattagtgcggatgatgagatggaggaatcagacgtggaggaggacctgcgacggttgactcccctcaagcctgttaaaaagaagaagcacaggttcggcctgcccgctggcgctcaggaggccccaatcaagaagaagcggccaccagtgaaggacgaggatcttaaaggggcaagaggtaaccttactaagaaccaggaaataaaatctaaaacctatcaggtgatgcgcgaatgtgagcaagccggaagtgctgctccctctgttttctcgcgcaccagaactggaactgagactgtgttcgaaaagccaaaggcagggcctacaaaaagcgtgttcggttag

SEQ ID NO: 30945 - DNA, 507 bp, synthetic construct
  source 1..507: mol_type = other DNA; note = Synthetic coding sequence
atgatgcttgggacagaaggaggcgaggggttcgtggtgaaagtgagaggactcccttggagttgcagcgcagatgaggttcaaagatttttttctgactgtaagatccagaacggggcacagggaattaggttcatctacacgagggaaggaaggccttccggagaggccttcgtggaactggagagcgaagatgaggttaagctagctctcaaaaaggacagggagacaatgggtcacaggtatgttgaggtgtttaagtccaataatgtggagatggattgggttctgaagcatacagggcctaatagtcccgacactgccaacgacgggttcgtgaggctgcgcggacttccatttggatgcagcaaagaggaaatagtgcagtttttttctgggcttgaaattgtccctaacggcatcaccctcccagtcgatttccaggggagatccacgggggaagcctttgtgcagtttgcgagccaagaaatcgcggagaaggcatag

SEQ ID NO: 30946 - skipped

SEQ ID NO: 30947 - DNA, 1131 bp, synthetic construct
  source 1..1131: mol_type = other DNA; note = Synthetic coding sequence
atgacaactgtcgtggtccacgtggactccaaagctgagctcaccaccttgctcgaacaatgggaaaaagaacacggcagtgggcaagatatggttcccatcctaacgaggatgagtcaattgattgagaaggagactgaagagtataggaaaggtgacccagacccttttgatgataggcacccaggcagagccgaccctgagtgcatgttgggtcatttgctgcgcattctcttcaagaacgatgacttcatgaatgccctggtgaacgcatacgtgatgacatcaagagagcctccactgaacaccgctgcctgccgccttcttctcgatattatgcccggtcttgaaaccgccgttgtctttcaggaaaaggaaggcatcgtggagaatctattcaagtgggcacgggaggccgaccagcctctccggacctacagcacaggcctgctgggcggagccatggaaaatcaggatatagctgccaactaccgagacgaaaatagccaactcgtcgccattgtcttacgacggctgcgcgaactgcagctgcaggaagttgccttacgccaggaaaataagcgcccaagtcctagaaaattgagcagcgagcctctactcccccttgacgaggaggccgttgatatggactacggagacatggcggtggacgtcgttgatggcgaccaggaggaagcgagcggggatatggaaatcagcttccaccttgacagcggacacaaaactagcagccgcgtgaattccactaccaaacctgaagacggtggactgaagaagaataagtcagctaagcagggagatagagagaatttcaggaaagcaaagcaaaagcttggcttcagttccagtgaccccgaccgaatgttcgtggagctttctaactcctcatggagcgagatgtcaccttgggtgattggtaccaattatacgctctaccccatgactccagctattgaacaaagactcattttgcagtacctgaccccactgggagaataccaggaactactacctatattcatgcagttaggatcacgcgagctaatgatgttttacattgatcttaagcagaccaacgacgtgctgctgacattcgaagctctcaagtag

SEQ ID NO: 30948 - DNA, 504 bp, synthetic construct
  source 1..504: mol_type = other DNA; note = Synthetic coding sequence
atgagcagcaacgagtgcttcaagtgcgggagaagcgggcactgggctcgagagtgtcccaccggaggaggacgaggaagaggcatgcggtctcggggaagagggggatttacaagtgacagagatatatgctatcggtgtggcgagtccggtcacctggcaaaagactgtgacttgcaagaggacgcttgttataactgcgggagaggcggacacatcgctaaggattgtaaggaacctaaaagggagcgtgaacaatgctgctataactgtggcaagcctggccacctggccagggattgcgatcacgctgatgaacaaaaatgttattcttgtggcgaatttggccacatccagaaggattgcactaaggtgaaatgttaccggtgcggcgagactggccatgtggccatcaattgtagcaaaacctcggaggtgaactgctatcggtgcggcgagtccggccatttggccagggaatgcactatcgaagccaccgcttag

SEQ ID NO: 30949 - DNA, 999 bp, synthetic construct
  source 1..999: mol_type = other DNA; note = Synthetic coding sequence
atgtccgaggccggtgaagaacaaccaatggaaacaaccggagccacagagaatgggcacgaggccgtgcctgagggagagagtcccgctggcgcaggaacaggtgccgctgcgggtgctggcggagctactgccgctcctccaagtgggaatcagaacggggcagaaggagaccaaatcaacgcgagtaaaaacgaggaagacgcgggaaagatgtttgtcgggggactctcctgggacacgtccaagaaggatctcaaggattactttacaaagttcggcgaggtggtggattgtaccatcaagatggatcccaacacaggcagatcccgcggtttcgggttcattttgtttaaggatgccgctagcgttgaaaaagtcttggaccagaaggagcatcgccttgacgggagagtcattgatcccaaaaaggccatggcgatgaaaaaggatccggttaaaaagatttttgtgggcggtttgaaccccgaggctactgaggagaagatccgtgaatattttggggagttcggtgagattgaggcaattgagctgccaatggaccccaaattgaataagaggcgaggctttgttttcatcactttcaaggaagaagagcccgtgaaaaaggttctggaaaagaagtttcatactgtatcgggatccaagtgtgagattaaggtggcccagccgaaagaagtgtaccagcaacagcagtatggcagcgggggaagaggcaaccgcaatagagggaaccggggaagcggcggaggcggaggcggaggcggacagagtcagagttggaaccaaggttacggaaattattggaatcaggggtacggatatcagcagggctatggcccaggctatggtggatacgactactccccgtacggctattatggctatgggccaggttacgattactctcaaggcagtacaaattacggaaaatctcagcggaggggcggtcatcagaacaattacaaaccgtattag

SEQ ID NO: 30950 - DNA, 615 bp, synthetic construct
  source 1..615: mol_type = other DNA; note = Synthetic coding sequence
atgtctgatctgaggattacagaggcgttcctgtacatggactacctatgctttcgcgcattgtgctgtaagggcccaccccctgctagacctgaatacgatctcgtgtgtattgggctgacaggctccggcaaaaccagtcttctttccaaactgtgttcggagtctccagacaacgtcgtctcaacaaccggcttttccattaaagccgtaccctttcagaacgccatactgaacgtaaaggaacttggtggtgccgataacattcgtaagtactggagccggtactaccagggctcccaaggtgtcatatttgtgttagattcggctagctctgaggatgacctcgaagcagccaggaatgagttgcacagtgcccttcagcaccctcaactgtgcacactgcccttcttaatactggctaaccaccaggataagccagccgcacggtccgtgcaagaaattaagaagtactttgagctggaacccttggcacgaggtaaacgttggattctgcagccttgcagcctcgatgacatggacgcactgaaagactcctttagccaattaatcaatctccttgaggagaaggaccacgaggccgtgaggatgtag

SEQ ID NO: 30951 - DNA, 6314 bp, synthetic construct
  source 1..6314: mol_type = other DNA; note = Synthetic coding sequence
atggaaagtcaggagtttatcgtgctctatacccaccagaagatgaaaaagtctaaggtgtggcaggacggcattctgaaaatcacccatcttggtaataaagccattctctatgacgacaagggagcatgcctcgaatcgttgttcttgaagtgtctagaggtcaaaccaggggatgatctggagtcagaccggtacctcattacggtggaagaagttaaggtggcaggggctattggcatcgtgaaacagaacgtcaataaggaagcacccgagctgaactccagaacattcatcagttccggcagatcactcggctgccaaccaagtggtttaaagagaaaatttaccgggttccaggggccaaggcaggtgccgaagaaaatggtcattatggaaagcggggagagcgccgcaagtcatgaagccaaaaagaccggtcctactattttttcgcctttttgttctatgcctcctctgtttcctactgtcgggaaaaaggacgtgaacaacatactcgctgatcctgaaaatattgttacttataagaatagagagcggaacgccatggacttctcctccgttttctctccttcatttcaaataaaccccgaggtgttgtgtgaagaaaactacttctgctctccagttaactccggaaataagttgtcagattcactgttaaccaatgagccagtgaagcgggactcattggccagccactattcaggcgtctcccaaaacatacggtcaaaagcacagattctggcactgctgaagagtgagtcctcttcaagctgcgaggaactgaattcagaaatgactgaacattttccacagaaacagcctcaagggtcacttaagatcgcgactaagccaaaatacctcattcagcaggaggagtgcgcagaaatgaagtccactgaaaacttgtattaccaacaccagtccgagaataccatgcggaacaaatctcgctgggccatgtatctgtcctcacagtcatcacccatacattcctccaccgtggacgggaatgacactgaaagaaaacctaaagcgcaggaggacgatgttaactctaatctgaaggacctgtccctgcagaagataattcagtttgtagaaacgtacgccgaagagcggaagaaatataacgtggatcagtccgtggggaataacgacccatcgtggaaccaggaggttaaactggaaataccctcatttaatgagagttcatccctgcaggttacatgctcaagtgctgagaatgacgggatcctgtctgaatcagatattcaggaggataacaagatcccattcaaccagaatgataagggctgcatcaaggggtcagtgttaatcaaggagaacgcgcaggaagtgaatacatgtggcactctggaaaaagaatatgaacaatctgagagtagcttaccagaactgaaacacttgcagattgaaagcagtaataacagcaggataagcgatgacattactgacatgattagcgaatctaagatggacaacgagagcttgaacagcatacacgagtctttgagcaacgtcacgcagccgtttcttgaggtcactttcaatctgaataactttgagacatcagacacagaagaggagtcccaagagtcaaacaagatctcccaggattccgagtcatgggtgaaggatatcttggtcaacgatggaaatagctgtttccaaaaacgaagcgaaaacacgaattgtgaggaaatcgagggagaacacctcccattcctgacctcagttagcgacaaaccaacggtcacctttcctgtcaaggagactttaccgagtcagttctgcgataagacgtacgtggggtttgatatgggcatttgcaaaaccgaaaacaccggcaaagaaattgaagagtactcagatacactctctaatttcgagtcctttaaatggactgatgccgtgtacggcgataacaaggaggacgctaataagcccatacaggaggtaaggattaactacgactttgccctgccaccaaacaagtcaaaaggcataaatatgaatctgcatatcccgcacatacagaatcagatcgcagaaaattcaaaccttttctctgaagacgcgcagccgcagccttttatcctgggaagcgacctggataaaaacgatgaacacgttctaccttccacatcttcatcagataactctgtgcagctattgaacaccaaccagaatcactatgaatgtattgctctggataaatccaacacccacatctcaaacagcctcttctatcccctgggcaagaagcatctgatttccaaggacacggaagcacacatctctgaacccgaagatctcggcaagataagatccccacctcccgaccacgtggaggtcgagaccgcaagggagggcaaacagtactggaaccccagaaattcaagcgagttgtccggcctcgtcaacacaatctcaatacttaaaagcctctgcgagcatagcacagcactggatagcctggagattcttaaaaaaaaaaacactgtcttccagcaaggcacccaacagacatatgagccggacagtcctcctgaagtgcggaaacccttcatcacagtggtcagcccgaaaagcccccacctgcataaagattctcagcaaattctgaaggaggacgaggtagagctgtcagaaccactgcagtctgttcaattcagctcttctggtagtaaagaggagacagccttccaggccgttatccccaaacagatagaaagaaaaacatgtgacccgaaacccgtggagtttcaggggcaccaggtcaaagggtccgcaacctcaggtgtgatggtgcggggacacagctcccagctgggatgttcacaattccctgacagtaccgagtacgagaacttcatgacagaaacccccgaattgcctagcacttgtatgcaaatcgacttcctacaggtaacctctcctgaagagaacatcagcacactgtctccagtcagcaccttctcgctgaattcacgcgacgaggacttcatggtcgagttcagcgaaacttctctgaaggccaggactcttcctgatgacctgcatttccttaatttggaagggatgaagaagagcagaagcctcgagaacgagaacctccagcgcctcagcctgctgagccgcacccaagtccccctcataactctgcctcggaccgacggacctcctgatctagactcacactcctatatgatcaattctaacacctacgagtcttccggatcacctatgttgaacctgtgcgagaaatctgcagtgctgtcattcagcatcgaaccagaagatcaaaatgaaactttcttttcagaggaaagccgcgaagtgaatcccggagatgtgagcctgaataatatttctactcagtccaaatggttgaagtatcagaatacatcgcagtgcaacgttgccacaccaaatagggtagataaacggatcactgacggatttttcgctgaggccgtttcaggcatgcacttcagagacactagcgagaggcagtctgatgccgtgaatgagtcatcgctggatagtgtacatctccagatgataaagggtatgctttaccagcagaggcaagacttttcatcccaggatagcgtgagtcgtaagaaagtgctctcgttaaacctaaaacaaacttctaaaacagaggaaatcaagaatgtcctggggggaagcacctgctataactattccgtgaaagaccttcaggaaatttctggcagtgagctgtgcttcccttctgggcagaagatcaagagtgcttacctgccgcaaagacagatacacattcctgcggttttccagtcgccagcacattataagcagacattcacttcatgcctgatcgaacatctgaacattcttctgtttggcctagcccagaatctgcagaaagctctgagtaaggtggacatctcattctatacctctctcaaaggtgagaaactgaaaaatgcggagaacaatgttcccagttgccatcattcacagcctgccaagctggtcatggtcaaaaaggaagggccaaacaaaggcaggttgttttacacatgtgacggcccaaaagctgataggtgtaagtttttcaaatggcttgaagacgttacgcctggatactccactcaggagggggctagacctggcatggtcctgtctgacataaaaagcattggactgtatctgcgctctcagaagattcccctctatgaggagtgccagctgcttgtgcgcaagggattcgattttcagcggaagcagtacggcaagttgaaaaaatttacgacagtcaatcctgaattttataacgagcccaaaaccaagttgtatttaaaactgtccaggaaagagcgcagttctgcatactctaagaacgatctctgggtggtcagcaagaccctcgacttcgagttagacacttttattgcatgtagtgcattctttggtccatcaagtattaacgagattgaaatactgccacttaaaggatacttccctagtaactggccaactaatatggtcgtccatgccctcctagtgtgtaacgcctcaactgagttaaccaccctcaagaatatccaggactatttcaatcccgctacactccccctgacgcagtatttgcttacgacatccagccctaccatcgttagtaataagagggtgtcgaagaggaagtttattccgcctgcctttaccaacgtatccaccaaattcgagctcctttccctcggcgctaccttgaaactggcatctgagctgatacaagtccataagctgaacaaggaccaagccaccgcactcattcaaatcgcacaaatgatggcctcacacgaatccattgaggaagtaaaggaactgcagacccatacatttccgattacaataatacacggcgtgtttggggctggcaagtcctacctgctggcagttgtgatactcttcttcgtccaactattcgaaaaatctgaagctccaacaatcggaaatgctcggccatggaaactccttattagctcctccactaatgtcgctgtggacagggtgttacttggcttattgtcactcggtttcgaaaactttatccgtgtgggatctgtcagaaagattgctaagcccatcctgccttactcccttcatgcaggatccgagaatgaaagtgaacagttgaaagagctacacgctctgatgaaagaagacctgacaccaacagagcgggtgtacgtcagaaagtcaatagagcagcacaaattaggaacaaatcggactctcctgaagcaggtgcgggtcgtaggtgtgacttgtgcagcttgtccattcccttgcatgaacgatctgaaattccctgttgtggtgcttgacgagtgttcccagatcaccgagccagcaagtctgctccctatagccaggttcgaatgcgagaagctgatcctcgtcggtgatcccaagcagctgcctcctactattcaagggtccgacgcagcccatgaaaacggccttgaacagaccctgttcgataggctctgtctgatgggccataaacctattcttctgagaacacagtaccgctgccatcccgcaatttccgccatagcaaatgacctcttttacaaaggcgctttgatgaatggcgtcactgagattgagcggtctccgctgctggagtggttgcccaccttatgcttctataatgtaaaagggttagaacagatagagagagataactcattccataacgttgccgaagccacattcaccctaaagttgattcagagtttaatcgcttccgggatagccggatccatgatcggcgtgataaccttatacaagtcccagatgtataagctgtgccatttgctgtcagcagtggacttccaccatcctgatataaaaactgtgcaggtgtcgacagtggacgcttttcagggggctgaaaaggagattatcattctatcctgtgttagaactaggcaggtgggttttatagacagcgaaaagaggatgaatgtggcactaactaggggcaaacgccatctgctgatcgtggggaatcttgcctgtctcagaaagaatcagctttggggcagagtgattcagcactgtgaaggtcgggaggacgggctgcaacacgccaaccagtacgagccccagttaaaccacttactcaaggattatttcgaaaaacaggtagaggaaaaacagaaaaagaagagtgaaaaggaaaagagcaaagataagtcccactccta

SEQ ID NO: 30952 - DNA, 567 bp, synthetic construct
  source 1..567: mol_type = other DNA; note = Synthetic coding sequence
atggccgctaccgctagggaggatggggcatcgggccaggagagaggtcagagaggttgtgagcactacgataggggctgtctgctaaaagcaccttgctgtgacaaactgtacacatgtaggctgtgccacgacaacaacgaggatcaccagctcgatcggtttaaggtcaaggaagtgcagtgtatcaattgcgaaaagatccagcacgcacagcagacatgcgaagagtgcagcacgctgttcggcgagtactattgtgacatatgccacctgtttgacaaggacaagaagcagtatcactgcgaaaactgtgggatttgcaggatcggcccaaaggaggatttctttcactgtctcaagtgtaatctctgcctcgccatgaatctgcagggacgtcacaagtgcattgaaaacgtctcaaggcagaattgccccatctgtctagaagatatccacacatcacgggtggtagcccatgtgctgccttgcggacacctgttacatcgcacgtgttatgaggagatgctgaaagaatacgaccaagttctcgagacggcaggatag

SEQ ID NO: 30953 - DNA, 339 bp, synthetic construct
  source 1..339: mol_type = other DNA; note = Synthetic coding sequence
atggcaacaggcgatctaaagagatcactgcggaatctggagcaagtgttgagacttcttaattatcccgaagaggtcgattgcgtcggcctcataaagggcgaccctgcagcttcgcttcccattatctcttattcatttacaagctactctccatatgtgacggaattaatcatggagtccaatgtcgaacttattgccaaaaacgacctgaggttcatcgacgccgtgtacaaactgcttagagaccagttcaattacaagccaattctcactaagaaacagtttattcagtgcgggtttgctgaatggaagatccagatcgtgtgtgatatctag

SEQ ID NO: 30954 - DNA, 363 bp, synthetic construct
  source 1..363: mol_type = other DNA; note = Synthetic coding sequence
atgtggaaggtcgtgaatctgcctacagacctcttcaattcggtcatgaatgtgggccgattcaccgaagaaatcgagtggctgaagttcctagccttggcatgctctgccttgggggtgaccattacaaagaccctaaagattgtgtgcgaggtgttgtcctgtgatcacaacggtggactgccaaggattccgttttccacattccagttcctgtacacgtatatcgcggaagtcgacggcgagatttgcgcatcccacgtgtctagaatgcttaattacatcgaacaggaggtaatcggacctgatggattgataacggtgaacgacttcacccagaatccgagggtttggctagagtag

SEQ ID NO: 30955 - DNA, 2490 bp, synthetic construct
  source 1..2490: mol_type = other DNA; note = Synthetic coding sequence
atggcgaaatacaataccggcggaaatcctaccgaggatgtctctgtaaactcacggcctttccgcgtgacagggcctaactctagctccggcatccaagccaggaaaaacttgttcaataaccaggggaacgcttcccctccggctggcccttccaacgtcccaaagttcggcagcccgaagcctcccgtcgccgtcaagccgtcttctgaagagaagcccgacaaagagcccaagccgcctttcctgaagcccactggagctggccagaggtttggaacgcccgcatcactgacaacaagggatccagaggccaaagttggcttcctgaaaccagtggggcctaaaccgatcaatttgccaaaagaagacagcaagcctactttcccatggcctccaggcaacaaaccgtctctgcattcagtgaaccaggaccatgatctgaagcctttaggccctaaatctgggcctactccaccgacctctgaaaacgagcagaagcaggcttttcccaagctgaccggagttaaaggaaagttcatgtccgcctcacaggacctggaacccaaaccgctgtttcccaaaccagcatttggacagaagcccccattatccacagaaaacagtcatgaagacgaatcccctatgaagaatgtgtcctcaagtaagggaagccctgcaccactgggggtgagaagcaagagtggtccattgaagcccgcacgtgaggactccgagaataaggaccacgcgggtgagatcagttccctgccctttccgggagtagtgttgaaacctgcagcaagtaggggcggtcctggcctctcgaagaatggagaggaaaaaaaggaggatcgcaaaatcgacgctgctaagaacaccttccagtctaagatcaaccaggaggaactggcctctggaacgccacccgctaggttccctaaggcaccttccaagctgacggtcggaggcccatgggggcagagtcaggaaaaagagaagggcgataagaactcagcaacccctaagcagaagcccttaccacctctgttcacactgggccctccaccgcctaaacctaatcgcccaccaaacgtggacctgactaagttccataagacttcctctggcaacagtacctcaaagggacagacatcttattcaaccacctcgctaccacctcctcccccttcgcaccctgctagccagcctcccctaccggctagccacccatcccagccgcctgttccatctctgcctccacggaacatcaaaccgccttttgacctgaagtcccctgttaacgaagacaatcaggacggggtgactcacagcgatggtgccggtaacttggatgaggagcaggactctgagggggagacctacgaggacattgaggcttctaaggagcgggaaaagaaacgcgagaaagaggaaaaaaaacgtttggagttggaaaagaaagagcagaaggagaaggaaaagaaagaacaggagattaagaaaaagtttaagctgacaggacccatccaagtgatacatctcgccaaagcctgctgtgacgtgaagggagggaagaatgaattatcttttaagcaaggcgaacagatcgagatcatacggatcacagataatcccgaaggcaagtggcttgggaggaccgccaggggctcctatggttatattaagaccaccgccgtggagatcgattatgactcattgaagttgaagaaagacagtcttggagctccaagtcgccctatcgaggatgatcaggaggtgtatgacgacgtggcagagcaggacgatatttcgtcccatagccagtccggctctggaggaattttccctccaccgccagacgacgatatatacgacggcattgaggaagaggatgccgacgacgggagtaccctccaggttcaagagaaatcaaatacatggagttggggaatcctgaagatgctgaagggaaaggacgatcggaagaaaagtatccgggaaaagccaaaagtgtctgactcggataacaatgaaggatcttcatttcctgctccacccaagcagttggatatgggcgacgaggtgtacgatgacgtagatacgtcggatttccccgtgtcttctgccgagatgtcccagggcactaacgtggggaaagcaaaaacagaagagaaagatctcaagaagctgaagaaacaggagaaagaagaaaaggactttcgtaagaagtttaagtacgacggcgagattcgagtcctgtactcaactaaagtcacaacgtcaatcacaagcaaaaagtgggggacaagggacctccaggttaagccaggagagtcactagaggttattcagacgactgacgatacgaaagttttgtgccgtaacgaggagggaaagtacggttatgtcctgagatcttatcttgctgacaatgatggggagatttacgacgacattgctgacggatgtatctatgataacgactag

SEQ ID NO: 30956 - DNA, 795 bp, synthetic construct
  source 1..795: mol_type = other DNA; note = Synthetic coding sequence
atgcccgactccgcacctgccatggctgacaaaatggacatgtcattggacgacatcattaagcttaacaggtcccagcggggaggaaggggaggcggacgcggaaggggcagggcaggtagtcagggtggcaggggcggaggcgctcaggccgcagcaagggttaacaggggcggtggccctatccgcaatcggcctgctatagcccgaggcgcagctgggggaggcggaaggaacaggccagccccttattcccggccaaaacagcttcccgacaaatggcaacacgacctctttgacagcggctttggcggtggagcaggcgtcgagaccgggggaaagctcttggtttcgaatcttgattttggggtgtcagacgccgacatccaggaactgttcgctgagtttggcacactgaagaaggccgctgttcattatgatcggtctggacggagcctgggcacagccgacgtgcacttcgagaggaaggctgatgcactcaaggccatgaagcagtataacggggtgccgctcgatggcagacccatgaatattcagctcgttaccagccagatcgacgcgcaaagaagacctgctcagagcgttaatcggggaggcatgacccgcaatcgcggtgccggaggcttcggtggaggcggaggaactcgtcgtggcacccgagggggagccagaggaagaggcagaggagctggtcgcaactccaaacagcaattgtctgcggaggagctcgacgcccaacttgacgcgtataatgcacggatggacacctcttag

SEQ ID NO: 30957 - DNA, 312 bp, synthetic construct
  source 1..312: mol_type = other DNA; note = Synthetic coding sequence
atggccaagcatggcgcagacgagccatcaagcagatcaggcagccccgatcgcgaaggcagagcgagtgaagacaggagtctccttcaccagcgcctcgccgtgcgcgaactgatcgacaccgaggtttcgtacctgcacatgctgcagctgtgcgcgagcgatattaggtcccggctgcaacaactgccacagggggatttggacgtgttattctcaaacatcgacgatatcatcaaggtcaatagcaggttcctccacgacctgcaggaaactgcctctaaagaagaggaacaggtccagttggtgtag

SEQ ID NO: 30958 - DNA, 639 bp, synthetic construct
  source 1..639: mol_type = other DNA; note = Synthetic coding sequence
atgatgctaggcaccgaaggcggagagggatttgtcgtcaaagtcagaggcctaccatggtcatgttcagccgacgaggttcagcggtttttctccgactgtaaaatccagaacggtgcgcagggtattcgcttcatctacacgcgcgagggccgaccttccggcgaagcatttgtagagctagagagcgaggatgaggtgaaacttgcgctcaaaaaggaccgcgagacaatgggccatagatatgtggaagtgttcaaatccaacaacgtggaaatggactgggtgcttaaacacaccggcccaaattcaccggacactgctaacgatggctttgtccgactccggggactgccattcgggtgctccaaggaggagattgtgcagtttttttctggcctggaaatagtccctaacggtattacattaccagtggacttccagggaagatctacgggagaggccttcgtccagttcgcctctcaggagattgcagagaaggcccttaagaagcataaagagcgaataggacaccgctatattgaaattttcaaatcatccagagctgaggttcggacccattacgaccccccacggaagctgatggctatgcaacgtcctggcccatacgacaggtag

SEQ ID NO: 30959 - DNA, 1020 bp, synthetic construct
  source 1..1020: mol_type = other DNA; note = Synthetic coding sequence
atgtggacagcacggggaccattccggagagaccggtggtcctccgaggacgaggaggccgctggcccttcccaagccctttcccctttactatccgatacaagaaaaattgtgtccgagggagagcttgaccagctggcacaaattaggcctctcatctttaactttcacgaacaaaccgcaataaaggactgtcttaaaatactcgaggaaaaaaccgccgcttacgacattatgcaggaatttatggcactcgaattgaaaaacctgccaggagagtttaattccgggaaccagccttctaacagagagaaaaatcggtaccgggatattctcccttatgacagtacccgtgtgcctctggggaaaagcaaagattacattaacgcttcttacatacgaatcgtgaactgtggagaggagtatttttatatcgccacccagggacccctcctgtcaactattgacgacttttggcagatggttttggaaaataattctaatgtgatcgccatgatcactcgagaaatcgaaggcggaattatcaagtgttaccactattggcctatttctctaaagaagcctctcgagctgaagcactttagagtgttcctcgagaactaccagattctgcagtacttcattatccgcatgtttcaagttgtagaaaaatctaccgggacatcacactccgtaaagcagctgcagtttactaagtggcctgaccacggcacccctgcctctgcagatagcttcatcaaatacattaggtatgcaagaaagagccaccttacaggaccaatggtcgtccattgcagcgccggaattggacggaccggggtattcctgtgcgtggacgtggtgttctgcgcgatcgtaaagaattgtagcttcaacattatggatatcgtggcccaaatgcgcgaacagcgtagcggcatggttcaaactaaagaacagtaccatttttgttatgatatcgtgctggaagtattgagaaaactgttgactttggattag

SEQ ID NO: 30960 - DNA, 3213 bp, synthetic construct
  source 1..3213: mol_type = other DNA; note = Synthetic coding sequence
atggcaggggcactccgacggggacgcgcactagggagtcgacccagcggtcctactgtgagctcacgacgtagtccccagtgcccagtggctcaggaggggctgggagcacgcagccgaccacgcgtggctcctcggtccttggctcgctgcggcccatctagccgactgatgggctggaagccttccgaagctagaggtcagagccagagctttcaggctagcggacttcagcctagatctctcaaagctgctcgacgggctacgggcagacctgatcggagtcgggcagctcgcccaaccatggacccatccgctcatcgctctcgcgctgcacctccaaatatggatcccgatcctcaggccggagtccaggtgggtatgcgggtggtgcgtggagttgactggaaatggggccagcaggacggcggagaaggtggcgttgggaccgtggtcgagctcggccgacatggcagccctagcactccggacaggaccgtcgtggtgcagtgggaccaaggaacccgtacaaattaccgggctggctaccagggcgctcatgacctgctgctgtacgacaacgcacagattggcgtgagacaccctaacatcatctgcgactgctgcaagaaacacggtctaagaggcatgaggtggaagtgccgagtctgcttggattatgatctgtgcacccaatgttatatgcacaataagcatgagctggcccatgctttcgaccggtacgagacggcacactcccggcctgtgactttatcacctaggcagggcctgcccaggataccactgagaggtatcttccagggggcaaaggtggtccgagggccagactgggaatggggcagccaggatggtggggaagggaaaccaggacgcgtggtcgacatccgcggatgggatgtggagacaggacggtctgtggcttcggtgacttgggccgatggtaccaccaacgtctacagagtggggcacaagggcaaagtcgacttgaaatgtgtgggcgaagccgctggtggcttttactataaagaccacctgcctagactgggcaagcctgctgagctgcagcgtagggtcagcgcagactctcagccgtttcaacatggagacaaggtgaaatgtttattggacactgatgtgctccgagaaatgcaggaagggcatggtgggtggaatcctagaatggctgagttcattgggcagacgggtaccgtacacagaattactgataggggcgatgtccgggtgcagtttaaccacgagactcgctggacatttcatcccggtgctctgacaaagcatcactcgttctgggtaggcgacgtcgtgcgggtgatcggcgacctcgacaccgtgaaacggctgcaggcagggcatggtgagtggaccgacgatatggcacccgctttaggacgcgtgggcaaggtcgtgaaggtgtttggggacggcaatctccgcgtcgcagtcgcgggtcagcgctggacattcagccctagctgcctagtagcctatcggccagaagaggacgcaaatctggacgtggccgagagggcgcgtgaaaacaaatccagtctctccgtcgccctggacaagttaagagcccaaaaaagcgaccctgagcaccctgggcgactggtggtggaagtggcgctgggtaatgctgcaagagccctggatctgctgaggcgtcggcctgagcaggtcgataccaaaaaccagggacggactgctctacaggtggcagcctatttaggtcaggtcgaacttattagactgctcctccaggcgagagcaggcgtggatctgccggacgatgaaggaaataccgctttacactacgccgcactgggtaatcagcccgaggctacacgagtcctgctgagcgccggatgtcgagccgacgctatcaatagcactcagtcaactgccctccacgtggcagtacagcgtggattccttgaagttgtgcgtgccttgtgcgagcgcggatgtgatgttaaccttcccgacgctcactcggacaccccccttcacagcgccatctccgctggcacaggagcaagtgggatcgtagaagtgttaactgaagtcccaaatatcgacgttacagccacgaactcccagggattcacacttctgcaccatgctagcctgaagggccacgcgctggccgtcagaaagatcctggcccgagctcgccagctggtcgatgcgaaaaaggaggatggttttaccgcactgcatcttgccgcactgaataatcacagagaggtagctcagatcctgattcgtgaagggaggtgcgacgttaacgtgagaaaccggaagctgcagagccctcttcacctggctgttcagcaggcccacgttggcctggtaccactgctggtggatgccggttgcagtgtcaacgcagaagatgaggagggtgataccgccctgcacgtggcccttcagcgccatcagctgctaccactggtggctgacggagctgggggagacccgggacctttacagctactcagccgtctacaggcgtccgggctgcctggctccgctgaactcacagtaggtgccgcagttgcttgctttttggccctagaaggcgctgatgtgagttacacaaatcacagggggaggtcacccctggatttagctgcggaaggtcgcgtcctgaaggcgcttcaggggtgcgctcagagatttagggagagacaggccggaggcggagccgctcctggacctaggcagacgctcggtactcccaacacggtgacgaacttacatgtaggagctgcccctggtcctgaggcagcagagtgccttgtctgttctgagctcgccctgctcgtcctattttctccatgtcagcacaggacagtctgtgaggaatgtgctcgacgcatgaagaagtgtatcagatgccaagtggtagtgtccaaaaaattgaggccagatgggagcgaggtggcttctgcagcgcctgcccctggccctccacgccagctcgtcgaggagctgcagagccgctaccgccagatggaggaacgtattacatgccctatttgtattgactctcacatccgcctcgtgtttcagtgtggtcatggtgcatgcgcgccatgcggttcagcactgagcgcctgcccgatctgtcgacagccaatcagagaccggattcagattttcgtttag

SEQ ID NO: 30961 - DNA, 957 bp, synthetic construct
  source 1..957: mol_type = other DNA; note = Synthetic coding sequence
atgtgcagaactgcccttggggttaccactctccaggacctgggcgtgtgctggcgcaaagagcacgatccagccgagatgctgcgcgtcgggagagctgagcttggcggatggaagcctagctgggaagccattgttaaggaagtcgctgccgctactggacacactgtcgtgctggtggaccagaccgaggatatactggccaagtctaaaaaaggtatcgaagagagcctccgcaaggtggctaagaaaaaattcgccgagaatctgaaggcgggagacgaatttgtggagaagacgctgagtacaattgctacttctaccgacgctgctagtgttgtccactctaccgacttggtggtggaagctattgtggagaacctgaaggttaagaacgagcttttcaaacggctggacaaatttgctgccgagcacacaatatttgctagcaacacaagtagcctgcagattacgtctatagccaacgcgactacgaggcaggatcgcttcgcaggcttgcatttctttaacccagttcccgtgatgaagctggtggaggtgattaaaacccctatgacgagccagaagacgttcgaaagtttggtggacttctccaaggcattagggaagcatccagttagctgtaaggacaccccaggctttatcgtcaaccgcctgttagtgccctacttgatggaggccattaggctttatgagcggggagacgccagcaaagaagacatagacacggccatgaagctgggggctgggtaccctatggggccatttgagcttctggattacgtcgggctcgacactactaagttcattgtcgacggatggcacgaaatggacgccgaaaaccccctgcaccaaccttcccccagtctgaacaaactggttgctgagaataagttcggaaagaagactggagaaggtttttacaagtataagtag

SEQ ID NO: 30962 - DNA, 1044 bp, synthetic construct
  source 1..1044: mol_type = other DNA; note = Synthetic coding sequence
atgaaactgacctcagaaaagctgcccaagaatcctttttatgcctcagtgagccaatacgcagcaaaaaatcagaaattcttccagtggaagaaggaaaagaccgattacactcacgcgaatttggtggataaggccttgcagctccttaaggagcgcatccttaaaggcgacaccctcgcatacttcctgagagggcagctgtactttgaggaaggatggtatgaagaggccctggaacaatttgaagagatcaaggaaaaagaccatcaggctacataccaattgggcgttatgtactatgatggcctgggaacaaccctcgatgctgagaaaggtgtggactacatgaagaagattctagacagtccttgcccgaaggcaagacacctcaaattcgcggcagcctataacctcggtagagcatattatgagggtaaaggagtcaagaggagcaacgaagaggccgaacggctctggctgattgccgctgataacgggaacccgaaggcttcagtgaaagctcaatccatgctgggcctctattatagcacgaaggagcccaaagaactcgagaaggccttttactggcacagcgaggcctgcggaaatgggaacctggagtctcagggagccctcgggctgatgtatctgtacggccaaggaatacggcaggatacagaggcagccctgcagtgcttgcgcgaagctgctgagaggggaaatgtgtatgcacagggcaatctagtggaatattattataagatgaaatttttcaccaagtgtgtagcatttagcaagcgaattgcggactacgatgaagtgcatgatatcccaatgatcgcccaagtaacagactgtttgccagaatttatcggaaggggcatggccatggctagcttttaccatgctcggtgtttgcagctgggtctgggcatcaccagggacgaaaccacagccaaacactactatagtaaggcttgccgcctgaacccggctcttgccgacgagttacattcgttgctgattagacagagaatttag

SEQ ID NO: 30963 - DNA, 108 bp, synthetic construct
  source 1..108: mol_type = other DNA; note = Synthetic coding sequence
atgccccaaaccttctctggcggtcgcggatttgagttggatagtggaagcgacgacatggacccgggaagaccacgcccacctcgagaccctgatgaactccactag

SEQ ID NO: 30964 - DNA, 1179 bp, synthetic construct
  source 1..1179: mol_type = other DNA; note = Synthetic coding sequence
atggggacaacctgcctgcatctgggaacgctagagcaatccctggtgttcgagaacaaggtgaatagtgagaaggttaagctctcactgcgcaactttccccataacgactatgaggacgtcttcgaggaacctagcgagtccggcagcgatccctcaatgtggactgccagaggaccctttcggagggaccgctggtcaagcgaagacgaggaggcggcaggcccatcccaagctctcagccctctactgtccgacactcgaaaaatagtctctgagggtgagctcgaccagttagctcagatccgcccacttatctttaattttcacgaacagacagcaataaaggactgcttaaagatcttggaagagaagaccgccgcatacgacattatgcaggagttcatggcactggagctgaagaatctcccaggagagttcaactcaggcaaccaaccgtcaaaccgggaaaagaatagatatcgtgacatactgccctatgactccacaagggtccctctgggcaaaagcaaggattacatcaatgccagttacataagaattgtgaactgcggggaagaatatttctatatcgccacccagggtccccttctatcaacgattgatgatttttggcagatggtcctggagaacaacagtaatgttatcgccatgatcacaagggagatcgaaggaggaataattaaatgttaccactactggcctatatctctgaagaaacccctagaactcaagcacttccgcgtgtttctcgagaactaccagattctgcaatatttcatcattaggatgttccaggtggtggagaaatccaccggcacgagccactctgtgaagcagttacagttcaccaaatggccggatcatggtactcctgcatcagcagattcctttatcaagtacatccgatatgcacgcaagtcgcacttgaccggaccgatggtcgtccactgctcagccggaataggccgtactggcgtctttctgtgtgtggacgtggtgttttgcgcaatcgtcaagaattgctccttcaacataatggacatagttgcacagatgcgcgagcagcggtcgggaatggtccagacgaaggaacagtatcatttctgttacgacattgtgctggaggtactccggaaactgctgaccctcgattag

SEQ ID NO: 30965 - DNA, 2052 bp, synthetic construct
  source 1..2052: mol_type = other DNA; note = Synthetic coding sequence
atgaacaccagtattccttaccagcagaacccgtataaccccaggggatcatccaatgtcatccagtgttacaggtgcggcgatacgtgcaagggagaggtcgtgagggtgcacaacaaccactttcacatccgctgcttcacttgtcaggtgtgtggctgcggcctcgcccagtccggcttctttttcaagaatcaagaatacatttgtactcaagattaccagcaactttacgggaccaggtgcgactcttgtcgagacttcataacgggtgaggtgattagcgctcttgggaggacatatcatcctaagtgttttgtttgttcgctgtgtaggaaaccctttcccataggagacaaggtgaccttttctggcaaagagtgtgtgtgtcagacatgtagccaaagcatggcatccagtaaaccgataaaaattcgcggtccaagtcactgcgctggctgcaaggaagaaatcaagcatggacaaagcctcctggcactggacaaacagtggcatgtgagctgttttaagtgccagacttgttcagtgatcctaacaggagagtatatcagcaaggacggagtgccctactgcgagtctgattaccacgctcagttcgggataaaatgtgaaacctgtgaccgctatatctccggacgggtgttggaggctggcggtaaacactaccaccccacctgtgctaggtgcgtgcgatgtcatcagatgtttaccgaaggggaggagatgtatcttaccggatccgaggtgtggcatcccatctgtaaacaagcggctagagctgagaaaaagctcaagcataggcggactagcgaaacttccatctctcctcctgggagttccatcggctcgcctaatcgagtcatatgtgcaaaggtggacaatgagattctaaattataaggacttggccgctctgcctaaggtaaagtcaatctacgaggtacagaggccagacctgatctcatacgaaccccatagccggtatatgtccgatgaaatgctggaacggtgcggatacggagaatctcttggcaccttaagcccttactcccaggacatttacgaaaacctggacctgcgccaacgaagggccagctcccctggctatatcgattcccctacctattctcgccaagggatgagcccaaccttcagccgatctcctcatcattattatagaagcggccctgaatccggccgaagctccccttatcattcacagttggacgtacggtcctctacaccaacatcttaccaggcacccaaacatttccatatccccgcaggggattccaacatctaccgcaaacccccaatctacaagcgccatggagatttaagcactgcaaccaaatctaaaactagcgaggacatttcacagaccagcaagtatagtccaatctattcccccgacccctactacgcatcggaatccgagtattggacgtatcacggtagtcccaaagttcccagggctcggaggttcagctcaggaggcgaggaagatgactttgatagatcaatgcataagcttcagtctggaattggtaggctgatcctgaaagaggagatgaaggcgagatcatctagctacgcagacccctggacccctccccgaagcagcacttcatcacgcgaggccctgcatacagccggatacgaaatgtctctgaatggcagcccgcgaagccactacctcgctgatagcgaccccctgatcagcaagagcgcgtccttgcccgcatataggaggaatgggcttcacaggactcctagtgccgatttgtttcattacgactcaatgaatgcagtgaattgggggatgcgagaatacaagatctacccttacgaactgctcttggtgacaactcggggtagaaaccgacttcccaaagacgtcgaccgcacacgtttggagcgtcatttgtcccaggaagagttttatcaggtctttgggatgactatcagtgaattcgacaggctggctctctggaaacggaatgagctcaaaaagcaggcccgtctgttctag

SEQ ID NO: 30966 - DNA, 99 bp, synthetic construct
  source 1..99: mol_type = other DNA; note = Synthetic coding sequence
atggattttttcagcagccaccttttggccgactcttctagccccgctaccaacagcagccacaccgacgcacatgaaattctggttagcgatttttag

SEQ ID NO: 30967 - DNA, 858 bp, synthetic construct
  source 1..858: mol_type = other DNA; note = Synthetic coding sequence
atgtcggaagccggtgaggagcaaccaatggaaacgaccggggcaacagaaaacggccatgaggcagttcctgagggcgaaagccctgccggagctggtacaggcgcagccgcaggtgcaggaggagctaccgccgcacccccttcgggaaatcagaatggcgctgagggagatcagataaatgcctcaaagaacgaggaggacgccggaaaaatgttcgtggggggattgagttgggatacctcaaagaaagatctgaaagactattttacaaagttcggtgaggttgtggattgtaccatcaagatggatcctaatacggggagatccagggggttcggatttatcctgttcaaggacgccgcaagcgtggaaaaggtcctggatcaaaaggaacacagactggatgggcgagtcatcgaccctaaaaaggccatggccatgaagaaggacccagtgaagaagatttttgtcggaggactgaatccagaggctaccgaggagaagatacgggagtactttggggagttcggcgagatcgaagcgatagagctccccatggatccgaagctgaataagcggcgaggatttgtgtttataacctttaaagaagaggagcccgtaaagaaagtgctggagaagaagttccatacggtctctggctcaaagtgcgagattaaggtcgcccagcccaaggaggtctaccagcagcagcagtacggctccggcggacggggaaatcggaataggggaaatagggggtccgggggaggtgggggtggaggaggccagggttcgactaattacggcaaatcccagcggagaggtggacaccagaacaactataaaccttattag

SEQ ID NO: 30968 - DNA, 354 bp, synthetic construct
  source 1..354: mol_type = other DNA; note = Synthetic coding sequence
atggtgcaacgcctcacttacagaaggcgcttatcatataataccgcatccaataaaacaaggctctcacgcactccagggaacaggattgtctacctttacaccaaaaaagttggcaaggcccctaaaagcgcatgcggagtatgcccaggcaggctcagaggcgttcgtgccgtcagacctaaggtgctgatgaggctttctaaaaccaaaaaacatgtctcgcgagcttacggaggctcaatgtgcgctaagtgtgtacgagaccgtatcaagcgagccttcctgatcgaggagcaaaaaatcgtggtgaaggtcctgaaagcgcaagctcagagccaaaaggctaagtag

SEQ ID NO: 30969 - DNA, 7613 bp, synthetic construct
  source 1..7613: mol_type = other DNA; note = Synthetic coding sequence
atggaagacttccggggtattgcagaagagtccttcccaagttttctgacaaacagcctgtttggaaactctgggatcctggagaatgtaactctgagttctaatttgggcctccccgttgcggtttccacccttgccagagataggtccagcaccgacaacagatatcccgatattcaagctagttatctggtagaagggagattcagcgtgccgtcaggaagttctcctgggagtcagtcggatgcagagccccgtgagagacttcagctttcctttcaggatgacgactcaatatcaaggaagaaaagctacgtcgaatcgcagcgactgtctaatgcattgagcaagcaatccgccctgcaaatggagacagccggacccgaggaagaaccagccggtgctacagaaagcctgcaaggccaggacctgtttaacagggctagccctctggaacaggctcaggacagcccaatcgatttccacttgcagagctggatgaacaataaagagcctaagattgtggtcctcgacgccggtaaacattttgaggataaaactctgaagtccgatttaagtcacacgagcctgctggagaacgaaaaacttatcctgcccactagtctggaagacagctcagacgacgacattgacgatgagatgttttatgatgatcatttggaggcctatttcgagcagctggcgatccccggtatgatatacgaagacctcgagggccctgagcccccagagaaagggttcaagctacctaccaatggactgagacaggcaaacgagaacggaagccttaattgcaaatttcagtccgagaacaatagctcactgatctccctcgacagtcattccagcgagacaacacacaaggagagcgaagaatcccaggttatctgtctgcctgggacatccaactctatcggtactggggattcacgccgttacaccgacggcatgcttcctttctcctccggcacctggggtaccgaaaaggagatcgagaatctcaaaggcatcgtgccagacctaaacagcgagtgtgcgagcaaggacgtgctggtcaagactcttagagcgatcgacgtgaagctcaactcagataatttccacgacgctaacgccaacaggggtgggttcgacttgaccgatcccgtcaaacagggggcagagtgcccgcaccagaacaaaaccgtcctgcatatggacggatgcttggataccgaaactcccacagtgtccatccaggagaatgttgacgtcgcctcactgaaacccatatcggacagtgggattaactttaccgatgctatatggagccccacctgcgagaggaggacatgcgaatgccacgaatctatagagaaaaataaagacaaaactgatctccctcagtctgtggtttatcaaaatgaagaaggaagatgggttacagacctagcgtattacaccagttttaacagcaagcagaacttgaatgtgtccctgagtgacgaaatgaacgaggactttcggagtggctccgaagccttcgacttgatcgcccaagacgaggaggaattcaacaaggagcaccagtttatacaggaggagaacatcgacgcccacaatacttcagtggcattaggcgatacgtcctggggggctactattaattactccctcctgagaaagtcccggtcaacttctgacttggacaaagacgacgcctcttatctgcgactgtcattgggagagttttttgcacagaggtcagaagccctgggatgtctgggcggtggcaataatgtgaagcggccttctttcggatactttattaggagcccggagaaacgcgagccaatagcattgattcgaaaaagcgatgtgtcgcggggaaaccttgaaaaggagatggcccatctgaaccacgacctgtacagcggagacttgaacgagcagagccaggcccagctgtccgaaggaagcatcactttgcaggttgaggctgtagagtccacctcacaagtagacgaaaatgacgtgaccctcactgctgataaaggcaagaccgaggacacattcttcatgtccaacaagccccaaagatacaaggataagctgcccgattccggcgacagcatgttaagaatctccactatcgcctccgctatagccgaggcgagtgtcaatacagacccctcacagctcgccgcaatgatcaaggcactgtcaaataagacaagagacaagactttccaggaggatgagaagcagaaagactatagtcatgtccgccatttcctgccgaatgatctggagaagtctaacgggtccaacgccttggatatggaaaagtaccttaagaagacagaagtgtctaggtatgagtcagcccttgagaattttagccgagcaagcatgtcggatacatgggacctgagcctgcccaaggagcaaacaacacaagatatacaccctgtcgatctcagtgctactagcgtttccgtgcgagccccagaggagaacactgctgccatcgtctacgtcgagaacggcgaatctgaaaaccaggaaagctttagaactatcaacagttcaaactcagttactaatagggaaaacaactcagccgtcgtcgacgttaaaacatgcagtatcgataataagttgcaggacgttggcaatgatgagaaagccacctcgataagcaccccctcggatagctacagctctgtgcgtaaccccagaattaccagtctttgcctgctgaaggattgtgaggagattcgggacaaccgagagaaccagagacagaatgagtgcgtgtccgagatctccaactcagaaaaacatgtgacctttgagaatcacagaatagtcagccctaagaattctgacttgaaaaatacaagcccggagcacgggggacggggatccgaggatgagcaggaaagttttcgcccttctaccagccctttgtctcatagttctccttcagagattagcggcacctccagctcagggtgcgcgcttgagagcttcggaagtgccgcacagcagcagcaacccccttgcgagcaggagctcagtccacttgtttgcagtccagccggtgtgagtcgcttaacctatgtgtcagagcctgagagtagctacccaaccactgccaccgacgacgcactcgaggataggaaatccgatatcacctcggaactctccacgacgatcatacaaggatccccggctgccctcgaggagcgcgcaatggagaagctgagggagaaggtgcccttccaaaatcgtggcaaagggacattaagctccataattcagaataactctgatactcgtaaagctactgagactacttcgcttagctcaaagcccgaatacgtgaagccagattttaggtggtctaaagacccctccagcaagtcaggaaatctactcgagacttcggaggtcggctggacgagcaaccctgaagaactagatccgatcagactggccctgttagggaagagcggcctgagctgccaggtcggaagcgccacatctcatcctgtgtcatgtcaggaacccatcgacgaagaccagcgaatctctccaaaagacaaatcaacagccggacgcgaatttagtggccaggtatcccatcagacaacttccgaaaaccagtgtacaccgatcccttcttccaccgtgcactcctccgtcgccgacatgcagaatatgcctgctgccgtgcacgccctcctgacccagccctcactctcggcggcaccgttcgcccagcggtatttggggacacttcctagcactggctcaaccaccctacctcagtgtcatgccggtaacgctaccgtgtgtggcttctcgggaggtctgccatacccagcagtcgctggggaacctgtccaaaattccgtagcagttgggatctgtttgggaagcaatatcgggagtggctggatgggcacaagtagcctgtgtaatccctactccaacacgctgaatcaaaacctgctttccactactaagccctttcctgtgcccagcgtcggcacgaattgcgggattgaaccctgggattccggggttacaagcggcctcggctcagtgcgagtccccgaggaactcaaacttcctcacgcttgctgtgtgggaatcgcttcacagactctactatctgtactgaatcccactgataggtggctccaggtgtcaattggtgttctcagcatttccgtgaacggcgagaaggtagacctgagtacataccggtgtctagtcttcaagaacaaagcgataattcgacctcacgcaaccgaagaaattaaggtgcttttcattccctccagcccaggagtgtttaggtgcacgttctcagttgcttcttggccctgctcaacagatgctgaaacaatagttcaggccgaggcgctcgctagtacagtcaccctaactgccatcgcagaatctcccgtgatcgaggtagaaaccgaaaagaaagacgttctcgattttggtgatctgacctatggcggatggaaagctcttccactgaaactaattaaccggacccacgctaccgttcccatccggctgatcattaacgcaaatgcagtggcatggcgctgctttacattctccaaagagagtgtgcgagcgccagtggaggtcgcaccctgcgccgatgtggtcaccagactggctggaccaagcgtggtcaatcacatgatgccagcatcctatgatggccaagatccagaattcctcatgatctgggtcttgtttcacagtcctaagaaacagatctcaagcagtgatatcctggattcggcggaagaattctccgccaaggtggacattgaagtcgacagtcctaaccccacacccgtcctaaggagcgttagcctgagggccagagctggcattgcccgtatccatgcaccacgtgatctgcagacaatgcatttcctggcaaaggttgcttcaagcagaaagcagcatcttcccctcaagaacgcaggcaacattgaagtttacctggacatcaaggtaccagagcagggctcacatttcagcgttgatcccaaaaacctgctactcaaaccgggtgaggagcatgaggtgattgtatcatttacccctaaggaccctgaagcatgcgaggaacggatactaaagattttcgtccaaccgtttggacctcagtacgaagtcgtattgaagggcgaagttatctcatcgggctcgaaacccctttctcctggtccctgtcttgacatccccagtatcctttccaataaacaatttctggcttggggaggtgtgcctctaggtagaacacaattacagaagttggccttaaggaacaattccgcctcgaccacccagcacctgcgactgttgatccgtggccaggaccaagactgcttccaactacaaaacaccttcggttcagagcagcgactgacctccaactgtgagattcggattcatcccaaggaagatatctttatcagtgtcctgtttgctccaacgagacttagctgcatgctcgcccgactggaaatcaaacagctgggaaaccgcagtcagcctggaattaaattcacgatccccctctccggatacgggggtacaagcaacctgattctggagggcgtcaagaagttgtccgattcttacatggtgaccgtcaacggcctagtcccgggtaaggagtcaaagattgtattttctgtcaggaataccggatcgagagccgcattcgtaaaagcagtgggtttcaaggatagccagaagaaagttctgctcgaccccaaggtccttcggattttccctgataaattcgtgctgaaggaaaggacgcaagaaaacgtgaccctaatttataatccgagtgaccggggaataaataataagactgccaccgaactgagtacagtctacctattcggaggcgacgaaatctcacggcagcagtaccggagagcgttactgcacaaaccagaaatgatcaaacaaatcttaccagagcacagcgttctgcagaacatcaacttcgtcgaagcgttccaggacgaactgctggttaccgaggtgtatgacctcccccaaagaccaaacgacgttcaactgttttacgggtccatgtgtaagattatcctcagcgtgattggcgaattcagagactgcatctccagcagagagttccttcagccaagcagtaaggcctccctggaaagcacaagcgatctgggagcttctggcaaacacggcggtaatgtgtccctggacgtgcttccagtgaagggcccacagggaagtccactgctatcacgagccgcacgacctccattggaccagctggcaagcgaggagccatggacagtacttcctgagcatctgatacttgtcgctccaagtccgtgcgatatggcgaagactggtcggttccagatcgtcaataactcagtccgcctcctcagatttgagctctgctggccagcacactgcctgaccgtgacaccacaacatgggtgcgtggcaccagagtccaagctgcagatcctggtgagtccaaattcgtccctttcgactaagcagtctatgttcccgtggagtggcctcatctacatccactgtgacgacgggcagaaaaagattgtgaaagtgcaaataagagaagacttgacccaagtggagttactaacaaggttgacttctaagccattcgggatattgagcccggtatccgaaccatctgtctcccacctggtgaaacctatgacgaagccaccatccaccaaggtggaaatacggaataagtctatcacattccccactaccgagcccggtgagaccagcgagtcttgcctggagctagagaatcatggaacaaccgacgtgaagtggcatctgtcatctctggcgccaccctatgttaaaggcgtggacgagagcggcgatgtgtttcgtgctacttacgccgcattcaggtgttctccaatttcgggactactggaaagccatggtattcaaaaagttagcatcacattccttcctcggggacgcggtgactacgcgcagttttgggatgtggagtgtcaccctctcaaagagccacacatgaagcacacgctgaggtttcagttgtctgggcaaagcattgaagccgaaaacgagccagagaacgcctgtctttctaccgactcactcatcaaaatagaccacttggtgaaacctaggagacaggctgtcagtgaagcctcagccagaatccctgaacagttagacgtcactgcacgcggtgtttatgctccagaggacgtgtacaggttcagacccacgtcagtcggtgagtctcgaactctgaaggtgaacctgcggaacaatagctttatcactcactctctgaagtttttgtctccacgcgagcctttttatgtcaaacattctaaatatagtctcagggcacagcactacatcaacatgcccgttcagttcaaacccaaatccgctggaaaattcgaggcccttctcgttatccaaacggacgaaggcaagtcaatcgccattcgcctgattggggaagccctgggtaagaacta

SEQ ID NO: 30970 - DNA, 90 bp, synthetic construct
  source 1..90: mol_type = other DNA; note = Synthetic coding sequence
atgctatgttgggggaacgcgagctttggacaactcggcttgggcggaatcgatgaggagatcgtattggaaccccgaaagtctgactag

SEQ ID NO: 30971 - DNA, 66 bp, synthetic construct
  source 1..66: mol_type = other DNA; note = Synthetic coding sequence
atggcgaaatacaatactggcggaaaccccaccgaggatgtctccgtcaactctaggcccttttag

SEQ ID NO: 30972 - DNA, 261 bp, synthetic construct
  source 1..261: mol_type = other DNA; note = Synthetic coding sequence
atggaggcagatattataacgaacctccggtgtcgtctcaaggaggctgaagaggaacgcctgaaagctgcccagtatggattacagttagttgagagccagaacgaactgcagaaccaactagacaaatgccggaatgaaatgatgactatgacggaatcctacgaacaagagaagtacacccttcagagggaagtggagcttaaatccaggatgctggagagtttaagctgcgagtgtgaggctattaagcagcaatag

SEQ ID NO: 30973 - DNA, 1983 bp, synthetic construct
  source 1..1983: mol_type = other DNA; note = Synthetic coding sequence
atggtgacaagcctgaacgaagataatgagagtgtgactgtcgaatggatagaaaacggggacacaaaggggaaggagatagacctggaatcaattttctcgttgaaccccgacttagtacccgacgaagagattgaaccttcaccggagaccccaccaccgccagcatccagcgctaaggtgaacaaaattgtgaaaaaccgcaggacggtagcctccattaagaacgacccaccctcaagggataatcgggttgtgggatcagccagggccaggcccagccagttcccagagcaaagcagctcagcccagcaaaatgctcggaggaaaagtaactgcgtgaaagaggtagagaaactccaggaaaagagagagaaaagaagactccagcagcaggaactgcgagagaagcgagcacaagacgttgatgccacaaatccaaattacgaaatcatgtgcatgatccgggatttccgagggtcactcgattaccggcctctcactaccgcggacccaatcgacgaacataggatttgcgtttgtgtcaggaaacgccctcttaacaagaaggagactcaaatgaaggatctggacgtgatcacaattcctagtaaggacgtggtgatggtccatgagcccaaacaaaaggtggatctgaccaggtatctcgaaaatcaaacatttcgattcgattatgctttcgatgattctgctccaaacgagatggtgtaccgtttcacggctcgccctctagttgaaactatatttgagaggggcatggccacatgctttgcttatggtcagacgggttcagggaagacccacacaatgggcggtgatttctccggaaagaatcaagattgctccaaagggatttacgccctcgcagctagggatgtatttctgatgctgaaaaagcccaattacaagaagcttgaactacaggtgtatgccacattctttgagatttattcaggcaaagtcttcgacctgttaaacaggaaaaccaaattgcgcgttctggaagacggcaaacagcaggtccaggtggtgggtcttcaggaaagggaagtgaagtgcgtggaggacgtgctgaagctcattgacatcggtaattcgtgtcggacttctgggcaaacgagtgccaatgctcattcaagtaggtcccacgcggtgtttcagatcattctgaggaggaaaggcaagctgcacggaaagttcagcctgattgatctcgccggtaacgagcgtggggctgataccagctctgcggatagacagacgcggctggaaggagccgaaatcaacaagtccctgctggctcttaaggaatgtatcagagctctgggcaggaacaagccccacactccttttcgggcttcaaagctgacgcaggttttgcgcgatagctttattggtgagaacagccgcacctgcatgatagcgacaatttcaccagggatggctagttgtgaaaataccctgaatactctaaggtacgccaacagagtgaaggagctgaccgtcgatccaaccgccgctggcgatgtacgccctattatgcaccatcctcccaatcaaatagacgacctcgaaacacagtggggggtggggtcctcccctcagcgagacgatctgaaactgctctgtgaacaaaatgaagaagaggtgagtccgcaactttttactttccatgaggctgtctcacagatggtggagatggaggaacaggtggtggaggatcaccgcgctgtgttccaggagagcattcgatggttggaggacgagaaagctttgttagaaatgacggaggaagttgactacgatgtcgactcttatgccacgcagctcgaagccatcttggagcagaaaattgacatccttactgagctgagagacaaagtgaagtccttcagggccgcactgcaggaagaggagcaagcatcaaagcagatcaatcccaagcgaccccgagccctgtag

SEQ ID NO: 30974 - DNA, 207 bp, synthetic construct
  source 1..207: mol_type = other DNA; note = Synthetic coding sequence
atgtcctctcctagggacttcagggcagagcccgttaatgactacgagggaaatgatagtgaagccgaagatctgaattttagggaaacactgccctccagctctcaggaaaacacacctaggtcgaaagtctttgagaataaggttaatagcgagaaagtgaagctgtcccttagaaattttcctcacaatgattatgaggactag

SEQ ID NO: 30975 - DNA, 294 bp, synthetic construct
  source 1..294: mol_type = other DNA; note = Synthetic coding sequence
atgaacgggagggcagatttccgcgaacctaacgctgaggttccccgaccgattccccatatcggacctgattacatcccgaccgaagaagagagaagggtcttcgcagagtgcaatgacgagtcattttggtttcggagtgtgcctctggccgctacctccatgctgatcacacagggactgatctccaagggtattctgtcgtcccatcctaaatacggttcaattcccaagctcatactggcttgtatcatggggtatttcgctggtaagctctcatatgtcaaaacatag

SEQ ID NO: 30976 - DNA, 309 bp, synthetic construct
  source 1..309: mol_type = other DNA; note = Synthetic coding sequence
atggttatggagaagccctccccactgctcgtggggagggagtttgtgagacaatactatactctcttgaataaagccccagaatacctgcatcggttttacggcaggaattcatcctatgtgcacggaggcgtagatgccagtggcaagcctcaagaggccgtatatggccagaatgacatacatcataaagtgctgagcctgaattttagtgagtgccatacaaagataaggcatgtggatgcgcacgcaaccctgagcgacggcgttgtggtgcaggtcatgggcttgttgagtaattctggctag

SEQ ID NO: 30977 - DNA, 597 bp, synthetic construct
  source 1..597: mol_type = other DNA; note = Synthetic coding sequence
atggggactacctgcttgcacctggggaccttagaacagagcctcgtgtttgagaataaggtgaattctgagaaagtgaaactgtcactacgaaacttcccgcacaatgactatgaagacgtttttgaggagcccagcgagagtggcagcgacccttcaatgtggacggcccgaggcccattccgacgcgaccggtggtcatctgaagacgaggaggccgctggcccatcccaagccctatcacccctgttatctgacaccagaaagatagtaagcgagggagagttagatcagcttgcccagatccggccactcatctttaacttccacgagcagaccgccatcaaagattgtctgaaaatccttgaggaaaaaacggcggcttatgacataatgcaggagtttatggcactcgagcttaagaacctgcccggagagttcaacagcgggaaccagcctagtaaccgagaaaagaataggtatagagatatcctacccttccagcaccacggatactcaggacccaacgaacggaccactttctggcacgggtctaatgagggagccgtctctctgttgctgcgttactgtgcctag

SEQ ID NO: 30978 - DNA, 384 bp, synthetic construct
  source 1..384: mol_type = other DNA; note = Synthetic coding sequence
atgcggcctctggatatagtcgaacttgccgaacccgaagaagtggaagtgcttgagcccgaggaggactttgaacaattccttttgcctgtgattaacgaaatgcgcgaggacatagcctcactgactagagaacatggaagggcttacctcaggaatcggtcgaaattgtgggagatggacaatatgcttatccaaataaaaacacaggtcgaggcgtctgaggagagcgccttaaaccatctgcagaaccccggagacgctgccgagggccgagccgcaaaacgatgcgagaaagcggaagagaaggccaaggaaatcgccaaaatggctgaaatgctagtggagctggtgaggcgtatagaaaagtctgagtcatcctag

SEQ ID NO: 30979 - DNA, 426 bp, synthetic construct
  source 1..426: mol_type = other DNA; note = Synthetic coding sequence
atggtcatggaaaagccctcccccttgttagttgggagggagtttgtccggcaatactacacgctactcaacaaggctcctgagtatttacacaggttctatggtcgaaatagctcttacgtgcacggcggagttgatgccagcggcaaacctcaggaggcagtttatggacagaatgatattcaccataaggtgctctccctgaacttctctgagtgccacacgaaaattcgccacgtcgatgcacatgcgactctgtctgatggggtggtcgtccaggtcatgggcctgttgtccaacagcggccagcccgagcgcaagttcatgcagacctttgtgttggcgccagaaggctctgtacctaacaagttttatgtgcacaacgatatgtttaggtatgaggacgaagtctttggggactcctag

SEQ ID NO: 30980 - DNA, 135 bp, synthetic construct
  source 1..135: mol_type = other DNA; note = Synthetic coding sequence
atgctgctgcttgattgcaatccagaagtcgatgggctcaaacaccttctcgagaccggcgcatccgtcaatgcaccacctgatccatgcaaacagtcccccgtccatctggctgcgggatcagggctggcctag

SEQ ID NO: 30981 - DNA, 399 bp, synthetic construct
  source 1..399: mol_type = other DNA; note = Synthetic coding sequence
atgaagaggggtcgcctgccgtcctcaagcgaggattccgatgacaacggatctctgagcacgacctggagtcaaaatagccgatctcagcacaggagatccagctgctctcggcacgaggacagaaaaccctccgaggtcttccgcacggatttaatcactgccatgaaacttcacgacagctatcagctcaaccccgacgagtattatgtcctcgctgacccatggcgacaagagtgggaaaagggggtccaggtccccgtctctccaggaacaatccctcagcccgtggccagagtggtatccgaagagaagtccctgatgttcattcgcccaaagaagtatatagtatccagtgggtctgaacccccagagctgggctacgttgatattcgctag

SEQ ID NO: 30982 - DNA, 972 bp, synthetic construct
  source 1..972: mol_type = other DNA; note = Synthetic coding sequence
atgcgcactgctgatcgcgaagctcgtccaggactcccctcacttcttctgctcctcttggcaggagcgggtctgtccgccgctagtcctcccgctgctcctcgattcaatgtgtctctcgacagcgtaccagaattacgttggctccccgtgctaagacactacgatctcgatctggtcagagctgcaatggcccaagtcatcggtgacagggtccccaagtgggtgcatgtgttaattggaaaggtggtcctggagctagagcggtttctcccacaacccttcaccggcgagatcagggggatgtgcgattttatgaacctaagccttgccgattgtctcctagtgaacctcgcctatgaaagctcagttttctgcaccagcatagttgctcaggactctcggggtcacatctaccacggcagaaatctggactatccttttggtaatgtccttagaaagctcacagtggatgtacaattccttaaaaacggccagattgcattcaccggcacaaccttcatcgggtatgtaggcttgtggacaggacagagcccacataagttcacggtgtcaggcgatgaacgggataagggttggtggtgggagaacgcgattgccgctctgtttcgcagacatatacccgtttcttggcttatacgggcaaccctctcagagagcgagaatttcgaggccgctgtgggcaagttggctaagactcccttgatagctgatgtttattacattgtcggaggcacctcaccccgtgagggggtcgtcatcactagaaatcgggacggccctgcagatatctggccattggaccctcttaatggcgcttggttccgtgtcgagacgaactacgatcactggaaaccggcacctaaggaagacgacagacggacgtctgccatcaaagctttgaatgccaccggacaggccaatttgtcactcgaagcactgtttcaatag

SEQ ID NO: 30983 - DNA, 312 bp, synthetic construct
  source 1..312: mol_type = other DNA; note = Synthetic coding sequence
atggcccagacagataaacctacatgcatcccacctgagctcccaaagatgcttaaagaatttgcgaaggcagcaattagagcgcagcctcaggatctaatccagtggggcgctgattacttcgaggcactgagccgcggagagaccccacccgtgcgggagagaagcgaacgagttgcattatgcaattgggccgaattgacccctgaactcctgaaaatcctgcatagtcaggttgccggaaggctgatcatccgcgcagaagagctggcgcagatgtggaaggtggttaatctccctactgatctgtag

SEQ ID NO: 30984 - DNA, 540 bp, synthetic construct
  source 1..540: mol_type = other DNA; note = Synthetic coding sequence
atggaggatggaacacctaagcacattatccagatgacaggtttcaagatggaggagaaggaggccctggtaaagcttctgctgaagctggactgcactttcatcaaaagtgaaaagtacaagaattgtacacatctgattgctgagcggctgtgcaaaagcgagaaatttcttgcggcatgcgccgcaggaaagtggattctgactaaagactatattatccactcggccaaatcaggtagatggctcgacgagacgacatatgaatggggttacaagattgagaaggactcgaggtactcgccgcagatgcagagcgctcctaagcgctggagagaggagctgaaacggactggcgctcctggcgcatttcatcgctggaaagtggttttgctcgttcggacagataagagatcagacagcttgatacgcaaaaagtttcggatgatgaaaattccaaaaccaattctgtttggactcaatattgcaatgaagaagcaaacgaaaatctcagggaagatgcaggactttttaaagtag

SEQ ID NO: 30985 - DNA, 453 bp, synthetic construct
  source 1..453: mol_type = other DNA; note = Synthetic coding sequence
atggaggcagatattataacgaatcttaggtgccggctaaaggaagccgaagaagagaggcttaaggccgctcaatacggcctacaactcgtagaatcacagaatgagctccaaaatcaattggacaagtgcagaaatgagatgatgaccatgaccgagagttatgagcaggaaaagtatacactacagcgagaggtggaactcaagtctagaatgctggaatctctgagctgcgaatgtgaggccattaagcagcagcagaagatgcatctcgagaagctagaagaacagctctctcgaagccatggacaggaagtgaacgaactaaaaaccaagatcgagaagctcaaagtggagctggacgaggcacgcctgagcgaaaaacagctgaaacatcaggtcgatcatcagaaggagcttctttcatgtaagtctgaggaactacgagtctag

SEQ ID NO: 30986 - DNA, 738 bp, synthetic construct
  source 1..738: mol_type = other DNA; note = Synthetic coding sequence
atgaacggacgggcagattttagggagccaaacgctgaggtcccaagaccaatccctcatattggcccagactatattccgacagaggaggagaggagggttttcgcagagtgcaatgatgagtctttctggtttcgatccgtgcctctggctgctacttcaatgttgatcacccagggcctcatctccaagggaatccttagcagtcatcctaagtatggcagcattcccaagctgatactggcgtgtattatggggtactttgcaggcaagttgagctacgtgaagacttgccaggagaaatttaaaaagcttgaaaacagcccacttggggaggcactcaggtcagggcaggccaggcgaagctcccctcctgggcactactatcagaagtctaagtatgactcttctgtgtccggacagtcgtccttcgtaacttcgcctgccgcagacaatatcgaaatgctcccacactacgagccaattcccttctcaagctctatgaacgaaagcgcacctaccggcatcaccgaccacattgtgcaaggccctgacccaaatcttgaagagagtcctaagaggaagaacattacatatgaggagcttagaaataaaaatagggagtcgtatgaggttagcctcactcagaaaactgatccatctgtgaggccaatgcatgaaagagtgcccaaaaaagaagtcaaagtgaataaatatggcgacacttgggacgagtag

SEQ ID NO: 30987 - DNA, 180 bp, synthetic construct
  source 1..180: mol_type = other DNA; note = Synthetic coding sequence
atggtcatggagaaaccgtcgccgctgctggtggggagggagttcgtgaggcaatattacaccctgctgaacaaggctccggaatacctgcataggttttacggcaggaactcttcgtatgtgcacgggggagtggacgcgtctggaaaaccccaggaggcagtctatggtcagaattag

SEQ ID NO: 30988 - DNA, 597 bp, synthetic construct
  source 1..597: mol_type = other DNA; note = Synthetic coding sequence
atgggtacgacttgtctgcacttgggaactctagaacagtctttagtgttcgagaacaaggttaatagcgagaaggtgaagctgtcactccggaactttccccacaatgattacgaggacgtgtttgaggagccctcggaatcggggagtgatccgtctatgtggaccgccaggggtccatttcgcagagacaggtggagtagtgaggacgaggaggctgctgggccaagccaggctttgtcccctctcctgtcggacactcgcaagatcgtgtctgagggagaattggatcagctggcacagatcagacctctgatctttaatttccacgagcagacagctataaaggattgtctgaagattctcgaagagaagactgccgcttacgacataatgcaggagtttatggccctggagttgaagaaccttcccggagagttcaactccgggaatcagccatcgaatagagagaagaacagataccgggatatattacccttccagcatcacgggtactcaggcccaaatgaaagaaccacattttggcacggctctaatgaaggtgctgtgagcctcctgcttagatactgcgcgtag

SEQ ID NO: 30989 - DNA, 465 bp, synthetic construct
  source 1..465: mol_type = other DNA; note = Synthetic coding sequence
atggcatccgcttctgccaggggtaaccaagacaaagacgcccatttcccccctccgtccaaacagtctctgctcttttgcccaaagagcaaattgcatattcaccgagcggagatcagcaaaatcatgcgggagtgtcaggaggagtccttttggaagagagccctccccttcagtctggtgtcaatgctcgtgacccagggcctcgtctatcaaggttacctggccgcaaattccagatttggatccctgccgaaagtagctcttgccggtcttctcggcttcggcctcgggaaggttagctacattggcgtttgtcagtcaaagtttcatttcttcgaggaccagctgcgcggagcgggatttggtcctcagcacaatcggcactgtctgctcacatgcgaagaatgcaagatcaaacacggactttccgaaaaaggggacagtcagccttctgccagctag

SEQ ID NO: 30990 - DNA, 2520 bp, synthetic construct
  source 1..2520: mol_type = other DNA; note = Synthetic coding sequence
atgagcgtggtgggaatcgatcttggttttctaaactgttacattgccgtagcacggagcgggggtatcgagactatcgccaatgaatactcagatagatgcacgcccgcatgcatatctctgggtagtcgcacaagggccatcggcaacgcggctaaatcccagatcgttactaacgtcagaaacacaattcatgggtttaagaagttgcatggtcgaagcttcgatgatcctatagtgcagacggaaaggattcggctgccgtacgagcttcagaaaatgccgaatggctcggctggtgtcaaggtacgttatctcgaggaagagcggcctttcgcaatcgaacaggtgacagggatgctcctcgctaagctcaaggagacttccgagaacgctctcaagaaacccgtcgccgactgtgtcatcagtattccaagtttctttacagatgccgagcgcagaagcgttatggctgcagcacaggtcgccggactcaactgcctgagactgatgaacgaaactacggcagtggctctggcctatgggatttacaaacaggatcttcctcccctggacgagaaaccacgcaacgtggtattcatcgacatggggcactctgcgtatcaggtgctggtgtgcgcattcaacaagggaaaactgaaggtgctggccaccacatttgatccttacctgggcggaaggaatttcgatgaggccctggtggactacttctgtgacgaatttaaaaccaagtataagataaatgtgaaagagaactctcgcgctctactgagattgtatcaggagtgcgagaagctcaagaaattgatgagtgcgaatgccagcgatctcccccttaacatcgaatgctttatgaacgacctggacgtgtcttccaaaatgaatagggcgcagtttgagcagttatgcgccagtttgctggctagagtagaaccacccttaaaggctgtgatggaacaggctaatctacagcgtgaggatattagctcaatagaaattgttggcggagcgactcgcatacctgccgtgaaagaacagataactaaattctttctgaaggatataagtacaacgctcaacgcagatgaggccgttgcacgaggttgcgcgctgcagtgtgcgatacttagtccagcttttaaagtacgagagttcagtatcactgatctggtgccctattccatcacccttcgctggaaaacatctttcgaagacggctctggggagtgtgaggtcttttgcaaaaatcaccccgcaccgtttagtaaagtaatcacttttcataaaaaagagcctttcgaattggaggccttctatactaacctccacgaggtcccttatcccgatgcccgaatcggctccttcactatacaaaatgtttttccccagtccgacggcgactccagcaaagttaaggtgaaggtgagagtgaacatccacggaattttttccgtggcgagcgcctccgtgatcgaaaagcagaacctggaaggtgaccactctgatgctcccatggaaaccgagacctccttcaaaaatgagaataaggataatatggacaagatgcaggtagaccaggaggaaggccaccagaaatgccacgcggaacacactccggaagaagaaatagatcatactggcgctaagaccaagtccgcagttagtgacaagcaggatcggttaaatcaaaccctcaagaaaggcaaggtgaagtccatcgacctacccatccagtcgtctttgtgtagacagctgggccaagacctgctgaactcatatatagaaaacgaaggcaaaatgattatgcaggacaagctggagaaggagcggaacgacgccaagaatgccgtggaggaatatgtgtacgattttagagaccggctgggtacagtctatgagaaattcattacccctgaggaccttagtaagctttccgccgtgctggaggatactgagaactggctttatgaagatggggaggaccagcccaagcaggtgtatgtcgataagctccaagagctgaagaaatacggccagccaattcagatgaaatatatggagcatgaggagcggcctaaagctctcaatgatctgggcaagaagatccagctggtgatgaaagtgatcgaggcgtatcgaaataaagacgaaagatacgatcatctggatcccaccgagatggaaaaggtcgagaaatgtatcagcgatgcaatgtcttggctgaattcaaagatgaatgcccagaacaaactaagtctaactcaagatcctgtagtgaaagtgagtgaaatagttgcaaagagtaaggagttagataacttctgtaatccaatcatctataaacctaagcctaaggccgaagtgcctgaagataagccaaaggccaactcggagcataacggccctatggacggccaatcagggactgagacgaaaagtgattctaccaaagattctagccagcacacaaagtcttcaggtgagatggaggtggattag

SEQ ID NO: 30991 - DNA, 54 bp, synthetic construct
  source 1..54: mol_type = other DNA; note = Synthetic coding sequence
atggacgaaggcatggagatttccagcgaggggaactcattgatcaaagcctag

SEQ ID NO: 30992 - DNA, 2394 bp, synthetic construct
  source 1..2394: mol_type = other DNA; note = Synthetic coding sequence
atgggcgtaagtcgactgatggacctgttggcggactcgcgggaggtcatcaggaacgacggcgttctcttgctgcaggctctgactcgtagtaacggggcaatacagaagattgtggcatttgaaaatgcctttgaaaggctacttgacattatttctgaagagggcaatagcgacggaggcatcgtggtagaggactgtttgattttgctccagaacctgctaaaaaataacaactctaatcaaaacttcttcaaggagggctcgtatattcagcgcatgaagccttggtttgaggttggggatgagaattcaggatggagcgcacaaaaggttacaaacctccacctcatgctacagctggtgagagttctagtgtctccaacaaatccgcctggcgctacgtcgtcatgccagaaagcaatgtttcaatgtgggttgttgcagcagctgtgtactattttgatggcaacgggagttcccgctgacatcctgacagagactattaatacagtttctgaggtgatcagaggttgccaggtcaaccaggattacttcgcatcggtgaatgctccgtcaaaccctccacggcctgcgatcgttgtgctcttgatgtcaatggttaacgagcggcagccattcgtcttacgatgtgcagtgttgtattgctttcagtgctttctgtacaaaaaccagaaaggacaaggggaaatcgtgagcaccctgctcccatccacaatcgacgctactggaaatagcgttagcgccggtcagttactgtgcggcggactgttcagcactgatagtctaagtaattggtgcgctgccgtggccctggctcacgccctacaagagaacgcaacccagaaagaacagctgctgcgggttcagttagcaacctccatcggaaaccccccagtgtcattacttcagcagtgcactaacattctgagccaaggctcaaagatccagactagagtaggacttctaatgctcttgtgtacttggctgtccaattgccctatcgccgtcacacacttcctccacaattcggcgaatgtgccattcctgaccggtcagatcgccgagaacctgggcgaagaagagcaattggtgcaagggctgtgcgcattactactcgggatcagcatctattttaacgataatagtctggaaagttatatgaaggaaaaactgaagcagttgattgagaagcgcatcgggaaggagaatttcatcgagaaactgggtttcatttctaagcacgagctgtattcaagggctagtcagaaaccccagcctaacttcccctctccagagtatatgatctttgaccatgaatttacaaagttggtaaaagaactggaaggcgtaatcactaaagcgatttacaaatcatctgaagaggataaaaaggaagaagaggttaaaaaaaccctagagcagcatgacaacatagtcacacactacaagaatatgattcgagagcaggacctacagctagaggaactgaggcagcaagtgtcaacactgaagtgtcagaatgaacagctgcagactgccgtgacccagcaagtctcccagattcaacagcacaaagatcagtataatctcctcaaaattcagctgggtaaggataaccaacaccagggcagttatagtgaaggggctcagatgaatggtatccagcctgaagaaattggacgactgcgcgaagaaattgaagagctaaagcgaaatcaagaactgctccagtctcagttgaccgaaaaagattccatgatagaaaacatgaaaagttcccagacctcaggcacaaatgaacagtcctcggccatcgttagcgcaagagacagtgagcaggtggcagagctgaagcaagagctcgctacactgaaaagccaactgaactcgcaatctgtggagataacaaagctgcaaacagagaaacaggaactgctacagaaaacggaagctttcgccaagagtgtcgaagtccaaggtgagaccgagaccattattgcaactaagaccaccgacgtcgagggacggctgtccgccctcctccaggagacaaaggagcttaagaatgagattaaggcgctgagtgaagagcggaccgcgataaaagagcagctggacagctcaaacagcacaattgctatccttcaaacagagaaggataagctagagcttgaaattacagactcgaaaaaggagcaggacgatttgctggtgctgctcgcagaccaagaccagaagattctgagcttgaagaataaacttaaagatcttgggcaccccgtggaagaagaagacgagctggaatcgggggatcaagaagacgaggatgacgaaagcgaggatcccggaaaagacctggaccacatctag

SEQ ID NO: 30993 - DNA, 441 bp, synthetic construct
  source 1..441: mol_type = other DNA; note = Synthetic coding sequence
tgaaggcatctgagggctacacctaacactaggggaagtgcaagactcctgtgcgccgagatgcctaaaaaagctggagcaaccacgaaaggcaagtcacaatcaaaggaacctgagcgccctttgccaccccttggacccgtcgcagtcgaccctaaggggtgtgttaccattgcgatacatgcaaaacccggttccaagcagaatgccgtaacagatctcacagccgaggccgtcaacgtggcgatcgcagcaccaccaagcgagggcgaggccaacgccgaactgtgcaggtatctctcaaaagttttggagttacggaagtcggatgtggtgctggacaagaagcttagagacctgttaaagatcgtgccttgtaaactggcaacccgcactcagattctggggctgcttgtggagtgcagcttttctaggctttag

SEQ ID NO: 30994 - DNA, 243 bp, synthetic construct
  source 1..243: mol_type = other DNA; note = Synthetic coding sequence
atgaacggtcgagctgacttccgggagccaaacgccgaggtgccgagacccattccacacattggacctgattatattccaactgaggaggaacggagggtatttgccgaatgtaacgacgaaagcttctggttccgctctgtgccactcgctgccacttctatgttaattacccagggcctgatcagcaaaggcatcctgtctagccatcccaagtacggctctatccccaaactgatctag

SEQ ID NO: 30995 - DNA, 360 bp, synthetic construct
  source 1..360: mol_type = other DNA; note = Synthetic coding sequence
atgaaaaggggtcggttacctagctcaagtgaggattcggacgataacggctcgctatcaaccacttggtcgcagaactcccgtagccagcataggagatcatcctgttcacgacacgaagaccgtaaaccatccgaagtgtttagaaccgatttgatcaccgccatgaaactccacgactcctatcagctgaaccccgatgagtattacgttctagccgacccttggaggcaagagtgggagaaaggcgtacaggttcccgtcagccccggtacaatccctcagcctgtggcaagggtggtgtcagaggaaaagagccttatgtttatccggccaaagaagtacatcgtcagttcctag

SEQ ID NO: 30996 - DNA, 69 bp, synthetic construct
  source 1..69: mol_type = other DNA; note = Synthetic coding sequence
atggccaagtataacacagggggaaaccctactgaggacgtgtctgtgaactctagaccatttagatag

SEQ ID NO: 30997 - DNA, 1059 bp, synthetic construct
  source 1..1059: mol_type = other DNA; note = Synthetic coding sequence
atggcagccgcagtgcggcaagatttagcccagcttatgaacagctctggaagtcacaaagatttggcgggtaagtaccgtcagatccttgaaaaagcaattcagctatctggtgccgaacagctagaggctttgaaggcgtttgtagaggctatggtaaacgaaaacgtctctctcgtgatttcaagacagctgctgactgatttttgcacacaccttcccaacttgccagactccacagccaaagagatctaccactttacactagagaaaatccagccacgcgtgattagcttcgaggagcaggtggcctctattaggcagcacctggcaagtatttacgaaaaggaagaagactggcggaatgcagctcaggtcctggtggggatccccctggaaacaggccagaaacagtacaacgtcgattacaagctagagacttacctaaagatcgcgcgattatatcttgaagacgacgacccagttcaagccgaggcttatattaatcgcgcttcattgcttcaaaatgagagcactaacgaacagctgcaaatccactacaaggtgtgttacgctcgcgtcctggactataggcgcaagttcattgaggcagcccagcgctacaacgaactgtcatataaaaccatagtgcacgaatccgagaggctggaagcactaaagcacgctcttcactgtactatccttgcgagtgctggtcagcagagaagccggatgctagccaccctgttcaaggacgagcgctgtcagcagctggccgcttacgggattctggagaagatgtacctggatagaatcattcgaggcaaccagctccaggaattcgcagcaatgcttatgcctcatcaaaaagcaaccaccgcagatggcagttctatccttgacagggccgtgattgaacacaacctgttgtcagccagcaagctgtataacaatatcacattcgaggaactgggggcactgctcgaaattcccgctgcgaaacacgagaaaccatgccagcgagggatcagtcgcagcaaccattttgtgagtaaatag

SEQ ID NO: 30998 - DNA, 378 bp, synthetic construct
  source 1..378: mol_type = other DNA; note = Synthetic coding sequence
atggtgatggagaaaccttcaccactacttgtggggagggaatttgtgcgacagtactacacactgctgaataaggctcctgagtacctgcacagattctacggacgaaattcctcctacgtacacgggggagtggatgcctccggcaagccacaggaggccgtgtacggccagaatgatatccaccacaaagtgctgtctttgaatttttccgagtgtcatacaaagatccggcatgtggatgcacacgcaaccctctctgacggagtggtggtgcaggtgatgggattgctgtccaatagcggtcaacccgagcggaaattcatgcaaacctttgtactggcgcctgaaggttccgttccgaataaattctactag

SEQ ID NO: 30999 - DNA, 657 bp, synthetic construct
  source 1..657: mol_type = other DNA; note = Synthetic coding sequence
atgaatggacgagctgacttccgcgagccaaacgccgaggttcctcggcctatccctcctgttcctcttgcagcgaccagcatgctcataactcagggcttaatctctaaaggcatcctgtcatcccaccccaaatacggttccataccaaaactgatactggcttgcatcatggggtattttgccggtaagttgtcctatgtcaaaacctgtcaggaaaagttcaaaaagctggagaatagccctctgggagaagctctaaggtccggacaagctcgcagaagttcgccaccagggcattattatcaaaaatccaagtatgactcttctgtgtctggtcaatcatcttttgttactagtccagctgccgataacattgagatgcttccccattatgagcccattccattcagcagcagcatgaatgagtccgccccaaccggcatcacggatcacatcgttcaaggtccagatcccaatctcgaggaatccccaaagaggaagaatattacctatgaggagctcaggaataaaaatcgagagtcatacgaagtttcgcttacacagaaaaccgacccaagcgtgaggcccatgcatgagcgggtgccaaaaaaggaggtcaaggtgaataagtacggggacacttgggacgagtag

SEQ ID NO: 31000 - DNA, 243 bp, synthetic construct
  source 1..243: mol_type = other DNA; note = Synthetic coding sequence
atgaatgggagggccgattttagggaacccaatgccgaggtgcctcgaccaataccacacatcggaccagattacattccaacagaggaggaaagaagggtctttgctgaatgtaatgatgagtccttctggtttcggtctgtgcctctggcagcaacgagcatgctgatcacacaaggcctgataagcaaggggatcctgtctagccacccaaagtacgggagcatccctaagctgatctag

SEQ ID NO: 31001 - DNA, 654 bp, synthetic construct
  source 1..654: mol_type = other DNA; note = Synthetic coding sequence
atgatagtaaacgattatgaggggaatgattccgaggctgaagatctgaacttccgggaaaccctgcctagcagcagccaggagaacactccaaggtcaaaagttttcgagaataaggtgaacagtgagaaagtgaaacttagcctgcggaatttccctcacaacgattatgaggatgtatttgaggaaccttccgagtccggctctgaccccagcatgtggaccgcgcgtggacctttcaggcgagataggtggagtagtgaggatgaggaggctgctggcccaagccaggctctcagcccactgctgtctgacacacggaaaattgtttcagaaggagagctagatcagcttgcccagatcaggcctctgatctttaattttcacgagcagacagccattaaagattgcctgaaaatcctagaggagaagaccgcagcatatgacatcatgcaggaatttatggccctggagttgaagaatttgcccggagagttcaattcaggaaaccagccctccaatcgggagaaaaatcgataccgggatatattgccattccagcaccacggctacagtggtcccaatgagcgtacaacattttggcatggctccaatgagggcgctgtgagtttattgctccgctactgcgcctag

SEQ ID NO: 31002 - DNA, 351 bp, synthetic construct
  source 1..351: mol_type = other DNA; note = Synthetic coding sequence
atgggacggctagatggaaaggtgattatcctgactgcagcagcccaggggatcggtcaggcagctgcccttgcatttgcccgtgaaggcgctaaggtgatagctacagacattaacgagagcaagctgcaggagctggagaagtaccccggtatccagacccgggtgttagatgtgacgaaaaaaaaacaaattgaccagttcgcaaatgaagtggagcgcctggacgttctgtttaatgtggcaggattcgttcaccacgggaccgtgctggactgtgaggagaaggactgggatttttctatgaacttaaatgtgcgctccatgtatttgatgattaaggccttctag

SEQ ID NO: 31003 - DNA, 504 bp, synthetic construct
  source 1..504: mol_type = other DNA; note = Synthetic coding sequence
atgaaagcaatcaagaaatctctgacagaggaggagtacctgtatctggatttttcacatcaaaccgagggctgcatatttccactccacacctccgttacactatttcttctgagttattgcgactgcaaaatctttaagatctgcctggtggtgaccaaggaagtttctcgggattcaagtctgctccgtgatgacttaatccaggacgttgaaattcagattatttcccggcaggaattaccccctatcgtccaaaattgttgcttacctgctgtagtggaaaggtctgataacttttgtcgagctgggctggcagtggtactccggcatattatccagaagtcttacgaagcagaccctttgaaaaaagagctcttagagctgctgggcttcaagaaaacctgtctgaaggcctgcgccgaggtgtcgcaatggacaaggctgtgcgagctgaccatccccttggccatcgagaactttctgagagagagttctgattag

SEQ ID NO: 31004 - DNA, 933 bp, synthetic construct
  source 1..933: mol_type = other DNA; note = Synthetic coding sequence
atgagccagcaactgaagaaacgcgctaagactagacatcagaaggggttggggggtagagccccttctggggctaaaccccgacagggaaagagttcccaggacctccaagccgagatagagcctgtgtcagctgtctgggccctgtgtgatggttacgtctgttacgagccgggacctcaggcccttgggggagatgacttctctgattgttacattgaatgcgtgattagaggtgaatttagccagccgattctggaagaagactccctgtttgagtctcttgaatacctcaagaaggggtcagagcagcagctttcccagaaggtctttgaagcctctagcttggaatgcagcttagagtatatgaagaaaggggtgaaaaaagagctgccacagaagatcgtgggcgaaaactctttggaatactcagagtatatgaccggtaaaaagcttccacctggtggaattccaggcattgacctaagcgatcccaaacaattggcggaattcgcacgaaagaaaccgcctattaacaaagaatacgacagcctgagcgctattgcttgcccccagagcggatgtactcgtaaacttcgcaaccgggctgctttaaggaaacacctgctgatacacggacccagagaccacgtctgtgccgagtgcggaaaggctttcgtggagagctcgaagctgaagaggcactttctggtgcacactggggaaaagccttttcgatgtactttcgaaggatgcggcaagagattttctctggacttcaacctgcgaactcacgtgcgtatccatacaggagaaaaacgctttgtgtgcccattccagggttgtaaccggaggttcatacaatcgaacaatttaaaagcccacattttaactcatgctaatacaaataagaacgagcaagagggcaaatag

SEQ ID NO: 31005 - DNA, 237 bp, synthetic construct
  source 1..237: mol_type = other DNA; note = Synthetic coding sequence
atggtcatggaaaaaccttcacccttattagtcggacgcgagttcgtgcggcagtactacacattgctaaacaaggctccggaatacctccataggttttatggcaggaatagcagctatgttcacggcggagtggacgccagcggtaagccacaggaggccgtctacggtcagaacgatatacaccacaaagtactaagtctgaacttctcagagtgtcacactaagatacgttag

SEQ ID NO: 31006 - DNA, 681 bp, synthetic construct
  source 1..681: mol_type = other DNA; note = Synthetic coding sequence
atgtcgagcccccgagatttccgcgctgaaccggtgaacgattatgaaggtaacgacagtgaggccgaggacttgaatttcagagaaactctgccaagctccagccaggaaaacacacctcggagcaaggtgtttgaaaataaagttaattccgagaaggtaaagctctctcttcggaattttccgcataatgactacgaggatgtcttcgaagaaccttcagaaagtggaagtgatccatctatgtggactgctcggggaccctttagacgagacagatggagcagcgaagacgaagaagccgcaggcccaagtcaggctctctcccctttgctgtcagacacgagaaaaattgtttctgaaggggaactggaccaactcgcgcaaattcggcctctgattttcaactttcatgaacaaactgcaattaaggactgcttaaaaatactggaagaaaagaccgccgcttacgacatcatgcaggagttcatggctctggagttgaaaaacctgccaggagaattcaactcaggcaaccagccttcaaatcgcgagaagaaccggtatcgcgatatcctgccattccagcatcacggatattctggaccaaacgagaggacgacattttggcacggttctaacgagggtgctgtgagcttgctcctgagatattgcgcctag

SEQ ID NO: 31007 - DNA, 1020 bp, synthetic construct
  source 1..1020: mol_type = other DNA; note = Synthetic coding sequence
atgtggactgctcggggtccttttcggagagaccgatggagcagtgaggacgaagaggccgctgggccatcccaagccctgagcccactgctgtccgatacccggaaaatagttagcgagggcgagttagaccagctggcccaaataagaccgctcatcttcaattttcatgagcagacggcaatcaaggactgtctaaaaatactggaggagaaaactgccgcatacgatataatgcaggaattcatggctctggagctgaaaaacctgccaggggagttcaactcgggaaaccaaccctcaaacagggagaagaatcgataccgcgatatcttaccttatgactcaacaagggtgcccctcggcaaaagtaaagactatataaatgccagttacataagaatcgtcaactgtggcgaagaatacttctacattgcaacccagggcccactcctctccacaatagacgatttttggcagatggtgctggagaacaattcaaatgttatcgcgatgatcacccgggagatcgaagggggaataataaagtgttatcactattggccaatttccctcaagaagccactcgagctgaagcatttccgtgttttccttgagaactaccagattctgcaatacttcataatccgaatgttccaggtggtggaaaagtccaccggcacatcgcactctgtgaagcagctgcaattcactaagtggccggaccacggcaccccagcaagtgccgattccttcataaaatatataaggtatgccaggaagagtcacctgactggaccgatggtagtccattgttccgcaggaatcggacgaactggcgttttcctgtgcgtagacgtggtgttctgcgcaatagttaagaactgttcattcaatatcatggatattgtggcccaaatgcgggagcagcggtcgggcatggtccagactaaagaacaatatcatttctgttatgacattgtgctggaggtgctcagaaaactcctgaccctggactag

SEQ ID NO: 31008 - DNA, 1179 bp, synthetic construct
  source 1..1179: mol_type = other DNA; note = Synthetic coding sequence
atggggactacctgtcttcatctcgggaccctggagcagtctctggtgttcgagaataaggtcaatagtgagaaggtgaaactgagtctacggaacttcccacacaacgattacgaagatgtgttcgaagagccgtcggagtctggctccgacccatcaatgtggacagcaaggggacctttccggcgtgacagatggtcttccgaggacgaagaagccgctggtccatctcaggcactctctccgctcctgtccgatacacgtaagattgttagcgaaggagaactagatcaactggcccagataaggccgctgatcttcaattttcacgagcagacggcaattaaagactgcctaaaaatcctggaagagaagacagcagcgtatgacattatgcaagagtttatggcactcgagctgaagaatctaccgggagagtttaactcaggaaaccaaccatcaaacagagaaaagaatagatacagggatatacttccgtacgattcgaccagagttccactgggtaaaagtaaagactatattaatgcctcttacattcggattgtcaattgtggagaggagtatttttacatcgccacacagggcccactgctgagcactatcgacgacttctggcaaatggttctggaaaacaatagcaatgtgatcgctatgattaccagagaaatcgagggcggaatcattaagtgctaccattactggcctatctctttaaaaaaaccactggaacttaagcacttcagagtgttcttagaaaattaccagattctccagtattttattatcagaatgttccaggttgtcgagaaaagcactggcacgtctcactcagttaagcagctccagtttaccaaatggcctgatcacgggacccccgcaagtgcggactcatttatcaagtatatccgctacgcccgtaagtcccacctgactgggccaatggtagtgcattgttctgccggaatcggccgaactggtgtgtttctttgcgtcgatgtggtattttgcgcgattgttaaaaactgttctttcaatatcatggatattgtggcacagatgagggagcaaaggtctggaatggtccagaccaaggaacagtatcatttctgttacgacattgtgcttgaggtgttgcgcaagctcctgaccctcgactag

SEQ ID NO: 31009 - DNA, 654 bp, synthetic construct
  source 1..654: mol_type = other DNA; note = Synthetic coding sequence
atgatcgtcaacgattacgaggggaatgatagcgaggccgaggacctgaacttccgagagacgctgccgtcttcttctcaggaaaacacaccacgctccaaggtgttcgagaacaaagtgaacagtgaaaaggtgaagctgtccctgagaaattttcctcataacgattacgaggacgtgttcgaagagccctctgaatccggaagtgaccctagcatgtggactgcaagagggccatttagacgcgacagatggtcctctgaggacgaagaggctgcaggcccatcgcaggctctctctcccctcctgtctgatacccgtaagatcgtgtccgagggagaacttgaccagcttgcccagattagaccccttatctttaatttccatgagcagacagctataaaggattgccttaagatacttgaggagaagaccgccgcatacgacatcatgcaggagtttatggccctcgagttgaaaaatttaccgggtgagttcaacagcgggaaccagccaagcaaccgcgagaagaatagatacagagatatcctaccttttcagcaccacggatactccggaccaaacgaacgcaccactttttggcacggatccaatgagggggctgtctctttactactccgctactgcgcctag

SEQ ID NO: 31010 - DNA, 438 bp, synthetic construct
  source 1..438: mol_type = other DNA; note = Synthetic coding sequence
atgtggacagccagaggcccattccgaagggaccggtggtcatccgaagatgaggaagccgcaggaccaagccaggccctgagtccattactatcagatacccgtaagatcgtctcagaaggtgagctggatcaactggcacaaatccggcctcttatcttcaattttcacgaacaaaccgcgattaaagactgcctgaaaattttggaagagaagacagcagcctacgacataatgcaagaatttatggcgctcgagctgaagaatttgcccggagaattcaattccggaaatcagccctctaaccgggagaagaaccgctacagggacattcttccattccagcatcatggctatagcggacccaacgaaagaacgacattttggcacgggagtaatgagggcgctgtgtcgttgcttctgcggtactgcgcctag

SEQ ID NO: 31011 - DNA, 207 bp, synthetic construct
  source 1..207: mol_type = other DNA; note = Synthetic coding sequence
atgagctccccccgagattttagggcagagccagtgaatgattacgagggcaatgattcagaggctgaggacttaaactttagagagacgctccctagcagcagccaggaaaatactcctcgttccaaagtctttgaaaataaagtgaactctgagaaggtcaagctctctcttcgaaattttcctcacaatgactacgaagactag

SEQ ID NO: 31012 - DNA, 525 bp, synthetic construct
  source 1..525: mol_type = other DNA; note = Synthetic coding sequence
atggcaaagtataatactggcggtaatcctacagaagacgttagtgtaaattccagaccgttccgcgtcacgggacccaattcaagcagcggaatacaggctagaaaaaatctattcaataaccagggcaatgccagcccccctgccggtccttctaatgtgcccaagttcggtagccctaagccccctgtggctgtcaagcccagctcagaagagaagccggacaaagagcccaagccccctttcctcaagcctactggcgctggccagcgctttgggactcctgcgtctttgaccacaagggatcccgaggcgaaggtggggtttctgaaacccgtgggtcctaagcccatcaatctgccgaaagaggattcaaaaccaacattcccgtggcccccaggaaacaaacctagtctgcacagcgtcaatcaagaccacgatctgaagcctcttggcccaaagtccggaccaacaccacccacatctgagaatgagcagaagcaggcatttcccaagctgacctag

SEQ ID NO: 31013 - DNA, 405 bp, synthetic construct
  source 1..405: mol_type = other DNA; note = Synthetic coding sequence
atgtctgatgatgctggagatacgcttgcaaccggagacaaagcggaagtaacggaaatgcctaactctgatagtctaccagaggacgctgaggtgcactgtgactcggctgctgtgtcacatgagcccactcccgctgacccaaggggcgagggtcacgaaaacgccgcagtgcaaggagctggggctgctgccataggtccaccagtgcagcctcaggatgccaatgcgttagagcccccacttaatggggacgtgactgaagatacattagccgagtgcattgatagtgtatctctggaggcggaaccccgttccgagataccactgcaggagcagaattatctggcagtggacagccctccttctggaggaggctgggcaggctggggctcctggggctag

SEQ ID NO: 31014 - DNA, 432 bp, synthetic construct
  source 1..432: mol_type = other DNA; note = Synthetic coding sequence
atgaaacgaggtcggctgccctcaagtagcgaagattcagatgataatggatcgttgtccaccacatggtctcagaatagcaggtcacagcaccggaggagctcctgttctcgacatgaggacagaaagcccagcgaggttttccgcacggatctgatcaccgcgatgaagcttcatgacagctatcaattaaacccagacgaatactacgtgctcgctgacccctggcgacaggagtgggagaagggagtgcaggtccctgtctcaccaggtactattccacaaccagtcgcacgcgtcgtaagcgaagagaagtctcttatgttcattcgcccaaagaaatacatcgtcagcagtggatcagagccacctgagctcggttatgttgatatccgcactctggctgatagtgtgtgccgctatgatttgtag

SEQ ID NO: 31015 - DNA, 1200 bp, synthetic construct
  source 1..1200: mol_type = other DNA; note = Synthetic coding sequence
atggactttttcagttctcatttgctagctgatagcagttctccagcaacaaatagtagccacaccgacgcccatgagattctcgtctcagacttcttagtcagcgatgaaaatctgcagaagatggaaaacgtccttgatctttggtcttctggtctgaaaaccaacattatctcagagctctcaaaatggagattaaactttattgactggcacagaatggagatgcggaaagaaaaggagaaacacgctgcacatttgaagcagctgtgcaaccaaattaatgaactaaaggaattacagaaaaccttcgagatttcgatcggcagaaaagacgaggtgatcagttccctctcccatgccatagggaaacagaaggaaaagatcgagctaatgaggacctttttccactggcggataggccacgttcgtgccagacaagacgtgtacgagggtaagttggcagatcagtactaccagcgaactttacttaaaaaagtctggaaagtgtggagatcagtggtgcagaagcaatggaaagatgtggtagaaagagcttgccaggccagggctgaggaggtttgcatacagatcagtaacgattacgaagccaaggttgccatgctgtccggagccctggaaaacgcaaaagctgagatccagcgtatgcagcacgaaaaggagcatttcgaggacagtatgaaaaaggcctttatgaggggcgtgtgcgcactgaatctagaagcaatgacaattttccaaaatcgcaatgatgctgggattgacagcactaacaacaagaaggaggagtacggccctggagtacagggaaaagaacacagtgcacatctagatccctccgccccacctatgccactccccgtgacttctccactgctgccctctcctcccgctgcagtaggcggagcgtcggcgaccgctgttccgtcagccgcttctatgacctctacccgcgctgcctcagcctccagcgtgcacgtgcccgttagcgcacttggtgccggtagcgccgctaccgcagccagcgaggaaatgcagactataccacaggctacagccgctaagtatccgaggaccatccatcccgaaagtagcacaagcgcatccagaagccttggcacccgatccgcccatacccagtcactcactagcgtccatagcattaaggtagtggattag

SEQ ID NO: 31016 - DNA, 240 bp, synthetic construct
  source 1..240: mol_type = other DNA; note = Synthetic coding sequence
atggatgagtccgctctgctagacctgctggagtgtcctgtgtgcctcgaaagactcgacgcctccgccaaagtcttaccatgccagcatactttctgtaaacgctgcttactcggcatcgtcggctctcgaaacgaactgcggtgtcccgagtgcagaacgctagtgggcagtggcgtcgaggagctgccctcaaacatcttgctggtgaggctcctggatggaataaaacagcgctag

SEQ ID NO: 31017 - DNA, 621 bp, synthetic construct
  source 1..621: mol_type = other DNA; note = Synthetic coding sequence
atgtcctccccaagggattttagagccgaacctgtaaatgattacgagggtaacgattccgaggcggaagatttaaacttcagggagacgctgccttcttcctcccaagagaacacgcctcgttctaaggtgtttgagaataaggtgaattccgaaaaggtgaagctaagtctgcgcaattttccgcacaatgactatgaagacgtgttcgaagaacctagcgagagtggctccgatccgtccatgtggaccgctcgtgggcctttcagacgggatcgatggtcgtccgaggacgaggaagctgctggtccatcccaggcgctctcaccactgctgtcggatactaggaagatcgtcagcgagggcgagcttgaccagcttgcccaaattcgtcccttaatctttaacttccacgagcagactgctataaaggactgtctgaaaattctggaggagaagactgccgcatacgacattatgcaagaattcatgtttaatatcatggatattgtcgctcagatgcgggagcagagatctggaatggtacagacgaaggaacagtatcacttttgttacgatatcgtccttgaggtcttacgtaaattactgactctagactag

SEQ ID NO: 31018 - DNA, 501 bp, synthetic construct
  source 1..501: mol_type = other DNA; note = Synthetic coding sequence
atgaaggccattaaaaaatcactaaccgaggaagagtatttatacctggattttagccatcaaacagagggctgcatcttccccctgcatacatccgtgacactctttctgctgagttactgtgactgcaagatcttcaagatctgcctcgttgtgacaaaagaggtttcgcgcgatagcagcctgcttcgggatgatttgattcaggatgtggagattcagataatttctagacaggagctgcctccaatcgtgcaaaactgttgtttacctgccgtcgttgagagatccgacaatttttgtcgcgctgggttagctgtggttcttcgccacataatccagaaaagctatgaggccgaccctctcaaaaaggagctcttagaactcctcggattcaaaaaaacttgtctaaaagcctgcgccgaggtgtctcagtggacccggttgtgcgaactcaccattcccctcgctattgagaattttttgagggagtcctcttag

SEQ ID NO: 31019 - DNA, 363 bp, synthetic construct
  source 1..363: mol_type = other DNA; note = Synthetic coding sequence
atgtggaaggtcgttaacctgcctactgatttgttcaacagtgtgatgaatgtcgggaggttcacagaagaaattgaatggcttaaatttctggcactggcttgcagtgccttaggcgtcactatcacaaagactttgaagattgtttgtgaggtgctcagctgcgatcacaatggtggcctgccacggatccctttctcgactttccagttcctttacacatatattgccgaggtcgacggggagatctgcgcctcgcacgtatctaggatgttgaactacatcgagcaggaggttattggtcccgacggactgattaccgtcaacgattttacccagaacccaagggtttggctcgaatag

SEQ ID NO: 31020 - DNA, 351 bp, synthetic construct
  source 1..351: mol_type = other DNA; note = Synthetic coding sequence
atggttatggaaaagccttcccccctactcgtaggacgggagtttgtgcgccagtactatactttacttaacaaagctccagagtatttacaccggttctatggacgtaattccagttatgtgcatggcggtgtggacgcctccgggaagcctcaagaggccgtctacggccagaacgatatacatcacaaagtcctgagcctgaacttctccgagtgccatactaaaatccgccacgtggacgcacatgcgaccctctccgacggtgtcgtagttcaggttatgggacttctttcgaacagtggccagcccgaaaggaaattcatgcagacattcgtgctagcaccatag

SEQ ID NO: 31021 - DNA, 480 bp, synthetic construct
  source 1..480: mol_type = other DNA; note = Synthetic coding sequence
atgtcggaccatcggtacggcgacggcggaagcacgttccagtccacaacgggtcattgcgtgcacatgcgagggctaccataccgcgcaacggaaaatgatatatacaatttcttctctcctctcaaccccgtgagggttcacatagaaatcggtccagacggcagggtaacgggggaagccgacgtcgaatttgctacccacgaggatgctgtggctgccatgtctaaagataaagccaacatgcagcatcgatacgtagagttattcttaaacagcactgcgggtgcgtctgggggagcctacggctctcagatgctgggtggaatgggcttaagtaaccaatcatcctatggtgggcctgcatctcagcagttatccggaggctatggaggcggttacggcggacagagtagcatgtctggatacgaccaagtcctccaggagaatagtagcgattttcaatcaaacattgcatag

SEQ ID NO: 31022 - DNA, 411 bp, synthetic construct
  source 1..411: mol_type = other DNA; note = Synthetic coding sequence
atgatcgttaatgactatgaaggcaatgactcagaagccgaagacctcaattttagagagaccctgccttcctcgtcccaggagaatactcctaggtcaaaggtgtttgaaaacaaggtgaactctgaaaaagtcaagctgtcactgcgcaactttcctcacaacgattatgaagatgtgtttgaggagccatccgaatctggatctgacccttcaatgtggaccgcacgcggtcctttcaggagagaccggtggtccagcgaagacgaggaggcagcagggcctagtcaggctctgtccccactcctatcagtgcagcatcacggctactcaggccctaacgaacgcacaactttttggcacggctctaatgagggagccgtgtctctactattgagatactgtgcatag

SEQ ID NO: 31023 - DNA, 462 bp, synthetic construct
  source 1..462: mol_type = other DNA; note = Synthetic coding sequence
atgaaactgacttccgaaaaattacccaagaatccattttacgcgtcagtctctcagtacgcggcaaagaatcagaagttcttccagtggaaaaaggagaagactgattacacccacgcaaacctggtagacaaggccctgcagctcctcaaagaacggatattgaagggagataccctagcgtatttcctgcgcggacaactgtacttcgaggaggggtggtacgaagaagcactggagcagttcgaggaaatcaaagagaaagatcaccaggctacctatcagctaggagtaatgtattacgacggactgggtactacgcttgacgctgagaagggggtagactacatgaagaaaatccttgacagtccctgcccgaaagcccgtcacctgaaatttgccgcagcctataatctgggtcgggcatactatgaaggcaaaggtgtgaaacgaagcaattag

SEQ ID NO: 31024 - DNA, 489 bp, synthetic construct
  source 1..489: mol_type = other DNA; note = Synthetic coding sequence
atggaagctctacttgagggcattcagaatagggggcacggaggcggttttctgacctcttgtgaggctgagcttcaggaactgatgaaacaaattgacatcatggtggcgcataaaaagtctgaatgggaagggaggacccacgcactggagacctgcctcaaaattcgggagcaggagcttaaatcgctgcggagtcagcttgatgtgactcacaaggaagtgggtatgctgcatcagcaggtagaggaacatgagaaaatcaaacaggagatgaccatggaatacaagcaggagctgaagaagctccacgaggagttgtgcatactgaagcggtcttatgagaaactacaaaaaaagcaaatgagagaatttcggggtaatacgaaaaatcaccgagaggatcgctctgaaatcgagcgcctcacagcgaaaatcgaggagttcagacagaagtctttggactgggagaaacaaagactgatttag

SEQ ID NO: 31025 - DNA, 1530 bp, synthetic construct
  source 1..1530: mol_type = other DNA; note = Synthetic coding sequence
atgaagaggggtcgcctcccaagctcctcggaagattcggatgacaacgggtctcttagcacaacatggtcccagaactcccgaagccagcacagaagatcctcctgttctagacatgaggatcggaagccttctgaagtgttccggaccgacctgataactgctatgaagctgcacgatagttaccaactgaatcccgatgagtactacgtgcttgctgatccctggcgacaggaatgggagaagggggtccaagtgcccgtgtctccaggcacaataccgcagcccgtagctagggtggtctctgaagaaaagtcattgatgtttattagacccaagaaatacattgtgtcatctggatccgaacctcctgaactcggctacgtcgacattaggaccctggctgacagtgtgtgtcgctacgacctgaacgacatggatgcggcttggctggagctgaccaacgaagaattcaaagagatgggcatgcccgagctggatgaatacaccatggagcgggtcctcgaagaatttgaacaacgctgctatgacaatatgaaccatgccatagaaaccgaggaggggctggggatagagtacgacgaagacgtggtgtgcgacgtctgccagagccctgacggcgaggatgggaacgagatggtgttctgtgacaaatgcaacatatgtgtgcaccaggcctgctacggcatcctgaaggtgcccgaagggtcctggctctgccgcacatgcgctcttggcgtacagcctaaatgcctcttgtgccctaagaaaggcggagcaatgaagcctacacggtccgggactaagtgggttcacgtgagctgtgcactgtggatccccgaagtgtctattggcagcccagaaaaaatggagcccattaccaaagtctcacatattcccagcagccggtgggccctggtctgtagtctgtgcaatgagaaatttggggcatcaatccaatgctcggtgaaaaactgtaggacagcctttcatgtgacatgtgcctttgatagggggctggaaatgaaaacaatccttgccgagaacgacgaggtcaaattcaaaagctattgtccaaagcactcctctcaccgtaaacctgaagaaagtttgggtaaaggagctgctcaggagaatggcgcacccgagtgcagcccgcgtaatccgttagaaccatttgccagcctggaacagaaccgggaggaagctcatcgtgtgtcagtacggaaacagaagctgcaacagctagaggacgagttttacacatttgtgaacctacttgacgtcgcacgggcactccgcctgccagaggaggtggtggatttcctgtatcagtattggaaacttaaaaggaaagtgaattttaataagcctctgattacaccaaagaaggatgaggaagacaacctagctaaaagagaacaggacgttctgtttcgaaggctccagctcttcacacatctaaggcaggacttggaacgggtgatgattgatacagacacgttatag

SEQ ID NO: 31026 - DNA, 90 bp, synthetic construct
  source 1..90: mol_type = other DNA; note = Synthetic coding sequence
atgaacggcagagccgattttcgcgagccaaatgccgaggttcctaggccgatcccccatatcggccctgattacattcccaccgaatag

SEQ ID NO: 31027 - DNA, 1236 bp, synthetic construct
  source 1..1236: mol_type = other DNA; note = Synthetic coding sequence
atgattgtcaatgactacgaaggcaacgatagtgaggctgaggacttgaactttcgggagacattgccgagttcatcccaggaaaacactcctagatcaaaggtgttcgagaacaaggtcaactcagagaaggtgaaactgtctctgcggaacttcccccacaatgattatgaggacgtcttcgaagagccttccgaaagcgggtcagatcccagtatgtggacagctaggggcccattcaggcgggaccggtggagcagtgaggatgaggaggcagctggccctagtcaagctctgtccccactcctttctgatacccggaaaattgtcagcgaaggggagctggaccagctcgcccagatccgtccattaatatttaattttcacgagcagactgctatcaaggactgccttaagattctcgaagagaagaccgctgcctatgatattatgcaggaattcatggccctagaactgaaaaatctgcccggagagtttaatagcgggaatcagccttccaatagagaaaagaacaggtaccgcgatatcttaccgtatgattccacaagggttccccttggcaagtcaaaggattacatcaatgcctcgtacatccgcatcgtgaactgtggtgaggaatatttttatatagctacacaggggccacttttgagcactatcgacgacttttggcaaatggtactagagaacaacagtaatgtcattgccatgatcacccgggaaatcgaaggaggcattatcaaatgctaccattattggcctatatctctcaagaagccgcttgaactaaaacacttccgagtgtttcttgaaaattaccagatcctccaatacttcatcattaggatgttccaggttgtcgaaaagtcaacgggcacaagccattcagtgaagcagctgcagtttactaaatggcctgatcacgggaccccagcgtcagcagacagcttcataaagtatatccgttacgccaggaagagtcatctgacagggcctatggtggtacactgcagtgccggaataggcagaactggcgtcttcctttgcgtcgatgttgtcttctgtgccatcgtcaaaaattgctctttcaatattatggatattgtagcccagatgcgggaacagcggtccggcatggtacagactaaggagcagtatcatttttgctacgacattgttttggaggtgctgcgcaaattgttgaccctcgactag

SEQ ID NO: 31028 - DNA, 300 bp, synthetic construct
  source 1..300: mol_type = other DNA; note = Synthetic coding sequence
atggtgatggagaagcctagtcccttactggtggggcgagaattcgttaggcaatattacactctcctcaacaaagctccagagtacctgcatcggttctacggaagaaactcttcctatgtgcatggcggagttgatgctagtgggaagccacaggaggcggtgtacggccaaaatgatattcaccacaaggttctctctttaaacttttccgagtgtcacactaagatccgacatgtcgatgctcatgccacactttctgacggtgtggtagtgcaggtcatgggattgctcagctag

SEQ ID NO: 31029 - DNA, 705 bp, synthetic construct
  source 1..705: mol_type = other DNA; note = Synthetic coding sequence
atggccagcagtgctaagtctgccgagatgcccacaattagcaagactgttaatcctactcctgacccccaccaggaatatttagatccacgtatcaccatcgccctgtttgagatcggcagccacagtccaagcagctggggatctctcccatttttgaaaaactcatcacaccaagttacagaacaacagaccgctcagaaattcaataacctactgaaggagatcaaagacattctgaagaatatggccggattcgaagagaagattacggaggcgaaggagctatttgaggaaacaaatatcaccgaggacgtctccgctcataaagagaatatccggggtctggataaaataaacgagatgctttctacgaacctgccggtgtccctcgcgccagagaaggaggacaacgagaagaaacaggagatgatccttgagactaacataacagaggatgtaagcgcacacaaggaaaatataagaggtctcgacaagattaatgagatgctcagcactaaccttccagtgtcgttagccccagaaaaagaagataatgagaagaagcagcagatgattatggaaaatcagaatagtgaaaacaccgcccaggtgtttgccagggaccttgtcaatagactggaggaaaagaaagtcctgaatgagacccaacagtcgcaggagaaggccaaaaacaggctgtag

SEQ ID NO: 31030 - DNA, 1095 bp, synthetic construct
  source 1..1095: mol_type = other DNA; note = Synthetic coding sequence
atgtatttttgctggggggcagacagccgcgagttgcagagaaggagaactgcaggctcacctggcgcagaacttctacaggccgctagcggagagcggcactcccttttactcctcacgaaccatcgagtcctatcctgcggcgataactccaggggacaactcgggaggaggggagcacagagaggggaacttcccgagcccattcaggctcttgaaacactgatcgtcgacctggtgtcttgcggcaaagaacatagcctggctgtatgccataaggggcgtgtcttcgcctggggcgctggtagcgagggccagctgggaattggtgagtttaaagagatttcttttactccgaagaagattatgactcttaatgatataaagattatccaggtctcgtgcggacactatcacagccttgccctctcaaaagattctcaggtcttttcatgggggaagaactcccatgggcagctgggtcttgggaaagagttcccctcgcaggcctccccccagcgcgtccggagtttggaaggcattcctcttgctcaagtggccgctggcggagcacatagcttcgcactgtccctttgtgggacgtcgtttggatgggggagtaattccgcagggcagttggccctgagtggccgaaacgtacctgtgcaatccaataaacccctgtctgttggggctctgaagaacctcggggtggtttacatcagctgtggagacgcacatacagccgtgttgacccaggatggaaaggttttcacattcggggacaataggtctggccagctgggttactcacctacccctgaaaagcgtggaccacagttggtggagcggatagacgggctcgtcagtcagatcgactgcggctcctaccacacattagcctacgtccacaccaccgggcaggtggtgtccttcggtcatggaccaagcgatactagtaagcccacacacccggaagctcttactgagaacttcgatattagctgcctgatttctgccgaggacttcgtcgatgttcaggtgaagcacatcttcgctggaacctacgccaattttgtaactacacaccaatag

SEQ ID NO: 31031 - DNA, 348 bp, synthetic construct
  source 1..348: mol_type = other DNA; note = Synthetic coding sequence
atggccaagtacaacactggtgggaatccaactgaggatgtgtcagtgaactctaggccattccgcgttactggaccgaacagcagtagcgggattcaggcccgtaagaatttatttaacaatcagggcaatgcaagcccaccagcaggtccctcgaacgttcctaaatttgggtcgcctaagcccccagttgcggttaagcccagctcagaggaaaagccggacaaggagccaaagcctccttttctgaagcccaccggcgcaggccagagattcggaacccccgcatcactcaccacgcgggacccggaagcaaaagtcggctttcttaaacccgtgggaccgtag

SEQ ID NO: 31032 - DNA, 486 bp, synthetic construct
  source 1..486: mol_type = other DNA; note = Synthetic coding sequence
atggcaggaatccttagactggtggtacaatggccacccggacgactccaaactgtaaccaaaggagtggaatcgctgatttgcactgattggatccggcataaatttacccggtcccgtattccggagaaagtgttccaagcctcacccgaggaccacgagaagtatggcggtgacccccagaatcctcacaagctccacatagtcaccagaatcaagtctactcgcagacgtccatactgggagaaggatataatcaaaatgctgggactggagaaagctcacacacctcaggtccacaaaaatataccctccgtgaacgctaaactaaaggtagttaaacatcttattagaatcaagcccctcaaactcccccagggattacctgcagaagagaatatgtcaaacacgtgtctcaagagtaccggggagctggtggtgcagtggcatctgaaacctgtcgagcaaaaggctcatgaatcctag

SEQ ID NO: 31033 - DNA, 516 bp, synthetic construct
  source 1..516: mol_type = other DNA; note = Synthetic coding sequence
atgaatggcagggctgacttccgcgagcctaacgccgaggtcccaaggcccatcccgcatattggcccagattacattccaacagaagaagagaggcgggtcttcgccgagtgtaacgacgaaagcttctggtttaggtcagtgccgctggccgctacaagcatgctgatcacccagggactcatttctaaaggaatcctaagcagtcatcccaaatatggcagcattccaaagctgatcctagcctgcattatgggttatttcgccggtaagttgtcgtacgtgaaaacctgccaggagaagttcaaaaagctcgagaactcacctcttggcgaggcactgcgaagtggtcaagcacgcagatccagcccacccggtcactattaccagaaatcgaagtacgatagctcagttagcggccagagcagctttgttaccagccccgctgccgacaatatcgagatgcttccccattacgagccaattcctttttcgagctctatgaacgaaagttag

SEQ ID NO: 31034 - DNA, 438 bp, synthetic construct
  source 1..438: mol_type = other DNA; note = Synthetic coding sequence
atgtcttcgcctcgtgacttccgcgctgagcctgtcaacgactatgagggcaacgacagcgaggcagaagatttaaattttagggaaactttgcctagcagttctcaggagaatacccccagaagtaaggtgttcgaaaataaggtaaactccgagaaggtcaaactcagtttacggaattttccgcacaatgactacgaagatgtttttgaggagccttctgagagcgggtcagacccctcgatgtggacagcaagaggcccattccggagagacagatggagtagtgaagatgaagaggccgctgggcctagccaagcattgagtcctttgctctccgtacaacaccacggctacagtggccctaatgagaggacaacgttttggcacggcagcaatgagggagccgtatccctattactcaggtactgcgcctag

SEQ ID NO: 31035 - DNA, 243 bp, synthetic construct
  source 1..243: mol_type = other DNA; note = Synthetic coding sequence
atggtcacctctcttaatgaagacaacgagagtgtgactgtagagtggatcgagaatggcgacactaaaggaaaggagatcgacctcgaatccatcttctcgttgaatcctgatctggtgcccgatgaagagatagaaccaagccctgaaacgcctccgccaccagcttcttctgctaaagtcaacaaaatcgtgaaaaataggaggacagtggccagcatcaagaacgacccaccatcttag

SEQ ID NO: 31036 - DNA, 123 bp, synthetic construct
  source 1..123: mol_type = other DNA; note = Synthetic coding sequence
atgaaggccattaagaaaagtctaactgaagaagaatatctgtatctggactttagtcaccagactgaggggtgtattttcccactgcacacctccgtgacactttttctcctgtcatattag

SEQ ID NO: 31037 - DNA, 192 bp, synthetic construct
  source 1..192: mol_type = other DNA; note = Synthetic coding sequence
atggaagcacttttggagggcatccagaaccggggacatggcggaggttttctgacttcctgcgaagccgaactgcaggagttgatgaaacaaattgacattatggtcgctcataaaaagagcgaatgggagggaagaactcatgctctagaaacttgcctgaaaattcgtgagcaagagcttaagagttag

SEQ ID NO: 31038 - DNA, 594 bp, synthetic construct
  source 1..594: mol_type = other DNA; note = Synthetic coding sequence
atgtggactgccaggggtccattccgaagggacaggtggtcctctgaggatgaggaagccgctgggccttcccaagcgttatcccctctgctctctgacactcggaagattgtgagcgaaggagagttggatcagctagcacaaatcagacctctgattttcaacttccacgaacagactgcgataaaagattgtcttaaaatcctggaagagaaaactgcagcctacgacatcatgcaggaattcatgacagggacctcacatagtgtgaagcaactccagtttactaagtggcccgaccacggtacacccgcttccgccgattcctttattaagtatatacgctatgccagaaagtcccatctgactggacccatggttgtgcactgcagcgctggtattgggcgtactggcgtatttctgtgcgtggacgtcgtcttttgcgctatcgtgaagaactgcagctttaatataatggatattgtggcacagatgagggagcagaggtctgggatggtccaaacaaaggaacaatatcacttctgttacgacattgtgcttgaggtgttaagaaagcttctgacattggattag

SEQ ID NO: 31039 - DNA, 2529 bp, synthetic construct
  source 1..2529: mol_type = other DNA; note = Synthetic coding sequence
atgaagcggggtaggttacccagtagttccgaggactccgatgacaatgggagtttaagtacaacctggagtcaaaattccagatcccaacaccgtcgaagctcatgtagccggcacgaggaccgaaagcctagcgaggtgtttcgcaccgatctcattactgcaatgaaactgcacgacagctatcagctgaaccccgatgaatattacgtactggcagatccttggcggcaagagtgggagaagggggtgcaagtacccgtgagccccggaaccatcccgcagcctgtcgctcgcgtagtgtccgaggagaaaagccttatgttcattagacccaaaaagtacatcgttagctccggctctgaacctcctgagctgggctacgttgacattagaaccctggccgattccgtctgcagatacgatctgaacgatatggacgccgcatggttggagttgactaacgaggagtttaaggaaatgggcatgccagaacttgacgagtacacaatggaacgcgttctggaagagttcgagcagaggtgctatgacaacatgaaccatgccatcgaaacggaggaaggattaggaatcgaatacgatgaagacgtggtgtgcgacgtatgtcagtctccagacggcgaggatggaaacgaaatggtgttctgcgataagtgcaacatatgtgtgcatcaggcttgctacgggattctgaaggtcccagaaggctcctggctgtgtcggacctgcgctctcggtgtgcagccaaagtgcttgctgtgccccaagaaaggtggggctatgaaaccaactagatcaggaactaaatgggttcatgttagttgcgctctctggattccagaggttagcattggcagccctgaaaagatggaaccaattaccaaagtatcccacattccttccagtcggtgggccctagtctgtagtctgtgcaacgaaaagttcggagccagcatccaatgctctgtcaaaaattgccgaacggcattccacgtcacatgtgcattcgatagaggcctcgaaatgaagacgatcctagccgagaatgacgaggtaaagttcaagtcctactgtcctaaacactccagccataggaagcccgaggagagcctcggcaagggagcggctcaagaaaacggcgctccggaatgctccccgagaaaccctctcgaaccattcgcctctctggaacagaatagagaggaggcacaccgtgtgtccgtgcgcaagcagaagctgcagcaactcgaggacgagttctacaccttcgtcaaccttttggacgttgccagagctctgaggctgccagaggaggtggtggattttctctaccagtactggaagctgaagagaaaggtgaatttcaataagccattgatcaccccaaagaaagatgaggaggataatctcgctaagagggagcaggatgtgctattcaggcgattacagcttttcactcatctgagacaagacctggaacgtgtccggaaccttacctacatggtcacccgacgtgagaaaattaagagaagcgtgtgcaaggtgcaggagcagatctttaacttgtacaccaagttactggagcaagaacgcgtcagtggggtcccttcttcatgctccagcagttcactggaaaatatgttgctgttcaactctcctagcgttggccctgacgcgccaaaaattgaggacctgaagtggcatagtgcgttctttcgaaagcaaatgggaacttctctcgtgcattcactgaaaaaaccccacaagagagacccattgcagaatagcccaggcagcgagggcaaaacactcctaaaacagccagatttatgcggtaggagggagggcatggtcgtgcctgaatctttcctgggactggagaaaacctttgccgaggcacgcctcatatcagctcagcagaagaatggagtcgtgatgcctgatcatggaaaaagacgagataaccgattccattgtgatcttataaaaggggatttaaaagataagtcctttaagcaatcacacaaaccgctgcggtcgaccgacgtgagtcagcgccatctggacaatacgcgcgctgccacatcccccggagttgggcagtccgccccaggaacaagaaaggagattgttcccaagtgtaatggcagtctaatcaaagtgaattacaaccaaactgctgtgaaggtgccgaccacaccagcatctccagtgaaaaattggggagggtttagaataccgaagaagggcgaaaggcagcagcagggagaagcccatgatggcgcatgccatcagcactctgattacccctacctgggattgggccgagttccagccaaggagcgagccaagtccaaactgaaaagcgataatgaaaacgacggctacgtgcccgacgtcgagatgagcgatagcgaatcagaggctagcgagaagaagtgtatccacacatcatcaactattagccgtcgtacggacataatccgacgctcgatcctggcatcttag

SEQ ID NO: 31040 - DNA, 2490 bp, synthetic construct
  source 1..2490: mol_type = other DNA; note = Synthetic coding sequence
atggcgaagtataacaccggcggaaacccaaccgaggacgtctctgtcaacagccgacccttcagagtcacaggcccaaatagctctagcggaatccaggcccgtaaaaacttgttcaataaccagggtaatgccagtcccccagccggtccaagcaacgtccctaaattcggaagtcccaaacccccagttgctgtgaagccttccagcgaagagaaaccagacaaggagcctaagcctccattcttaaagccaacgggagcgggtcaacggttcggcaccccagcttcccttactaccagagatccagaagctaaagtgggattcctcaagcccgttggcccaaagcccattaatctcccaaaagaagactctaaacccaccttcccttggcctccaggcaacaaaccttccctgcattccgttaaccaggatcacgacctcaaacccttaggcccaaagtcagggcctaccccacccactagcgaaaacgagcagaaacaggcttttcccaagctaacgggggttaaaggtaaattcatgtctgccagccaggacctggaacctaagcctctattccctaagcctgctttcggtcaaaagcctcctctctctaccgaaaattcacatgaggatgagagtcccatgaaaaatgtcagtagttcaaagggcagtcccgctcctttaggggtgaggtccaaatccggaccattaaaacccgctagggaagattctgaaaacaaggatcatgcaggagagatctcctccctccctttccccggagttgtcctcaagcccgctgcatcaaggggcggtccagggctgtcgaagaatggggaggagaaaaaggaagacagaaagatcgacgccgcaaagaatacctttcagtcaaagatcaatcaggaggagctggcatctggcacaccgccagctcgcttcccaaaggccccttcaaaacttacggtggggggaccatggggacagagtcaggaaaaagagaaaggggacaagaattccgccactccaaaacagaagcctttacctcccctgtttacactcggtcctccacctccaaaaccaaatcggccacctaatgtcgatctcactaagttccataaaacatctagcgggaactcaacgtctaaagggcagacgagctacagtactacctctctgccccctccgccaccgagccaccccgcttctcagcctccccttccagcttctcatccttctcagccccctgttcccagtctgccccctcgcaacatcaaacctccttttgacctcaagagtccagtgaatgaggataaccaggatggcgtgacacactctgacggggcagggaatcttgatgaagaacaggattccgagggggaaacgtatgaagatatcgaagcaagcaaggagcgggaaaagaagagggagaaagaagagaaaaagagacttgaactggagaaaaaagagcagaaggagaaggaaaagaaagaacaggagataaaaaagaagtttaagcttacaggaccgatccaggttatccatctcgccaaggcgtgttgtgatgtgaaaggcggtaaaaatgaactgtcattcaaacagggggaacagattgagataatccgaatcaccgacaatcccgagggcaaatggctaggacggactgctcgcggatcgtatgggtacataaaaaccacagcggtggaaattgactacgatagcttgaaactgaagaaagactccctcggcgcaccgtcccgacccatagaagatgatcaggaagtgtacgacgatgtcgccgaacaagatgacatatccagtcactctcaatcaggctcagggggaatttttccacctcctcccgatgacgacatttacgatgggatagaagaagaggatgctgatgatggcagcacgctgcaggtgcaggagaaaagcaacacgtggagttggggtatccttaaaatgttgaaaggcaaggacgataggaagaagtcgatcagagagaaaccaaaggtctctgactctgacaataatgaggggtcctcatttccggcaccaccaaaacagctggatatgggggatgaggtatacgacgacgtggacacctccgacttcccagtaagcagcgccgaaatgtctcaggggacgaatgtggggaaagcaaagaccgaggaaaaggatctgaaaaagctgaaaaaacaggaaaaggaagagaaggatttcagaaaaaagtttaaatacgacggggaaatccgcgtcctctactctacaaaagtaaccaccagtattacctccaaaaagtgggggacccgagacctgcaagttaaacccggtgaatcattggaagtgatacagacaactgacgataccaaggtactatgcagaaacgaagagggtaagtacggatacgttttgcgtagctacctggcagataacgacggcgaaatctatgatgacatcgcagatggatgcatttacgataatgactag

SEQ ID NO: 31041 - DNA, 810 bp, synthetic construct
  source 1..810: mol_type = other DNA; note = Synthetic coding sequence
atgatcgtgaatgactacgaaggaaacgactccgaagctgaagacttgaactttcgcgaaaccttgccctctagtagccaagagaatacgcctcgatccaaggtattcgagaacaaggtcaactccgaaaaggtgaaattgtcgctcagaaacttccctcacaacgattatgaagatgttttcgaagaaccctcagagagtggctcagatccatcaatgtggacagccaggggcccatttagaagggaccgttggagttccgaggatgaggaggcggcaggacccagtcaggctctgagccctttgctctccgacacaagaaagatcgtgtccgaaggggaactagaccagctggctcaaatccgacctctgatttttaactttcacgagcaaacagctatcaaagactgtctgaaaatattggaagagaaaactgctgcgtatgatatcatgcaagagtttatgactggtacttctcactcagttaaacagttgcaatttaccaagtggcccgatcatggtacacccgctagcgctgactcttttatcaagtacattcgttatgcaaggaagtcccacttaacgggtccgatggtcgtgcattgtagtgctggaataggaagaactggagtctttctctgcgtggacgtggtgttttgcgcgatagtgaagaattgttcattcaatatcatggacatagtcgctcaaatgcgggagcagcggtcagggatggtacagacaaaggagcagtaccacttttgctacgatattgttcttgaagtcctccgcaagttgctcactctggactag

SEQ ID NO: 31042 - DNA, 492 bp, synthetic construct
  source 1..492: mol_type = other DNA; note = Synthetic coding sequence
atgatgttgggcactgaaggaggagaaggtttcgttgtcaaggtgaggggccttccttggtcttgctctgcagacgaggttcagagattcttctccgattgtaaaattcagaatggcgcacagggaatccggtttatatatacaagggaaggcagaccctccggcgaggcgttcgtggagctcgagagtgaagacgaggtgaaactggctctgaaaaaggacagagagacaatgggccaccgatacgtggaagtgtttaagagcaacaacgtcgaaatggactgggtgctcaagcacacaggacccaactctccggatacagctaacgatggtttcgtcagactgcggggattgccttttggatgctcgaaagaggagatcgtgcagttctttagcggactggagatcgttcccaatgggatcacacttccagtcgacttccagggcaggagtacaggcgaggcgttcgtacagttcgccagtcaggaatag

SEQ ID NO: 31043 - DNA, 759 bp, synthetic construct
  source 1..759: mol_type = other DNA; note = Synthetic coding sequence
atggctgcaacggccagggaagacggggctagtggacaggagagaggacagaggggatgtgagcactacgatagagggtgcctgctcaaagccccatgttgcgacaagctctatacatgtagattatgtcacgataacaacgaggatcaccagctggacagatttaaggtcaaagaagtccaatgcattaattgtgagaaaatccagcacgcccagcagacctgcgaagaatgcagcacactgttcggcgagtattactgcgacatatgtcacttattcgataaggataaaaaacaatatcattgtgaaaattgtggaatctgccgcatcggccctaaggaggacttctttcactgtctgaaatgtaacctctgtctggccatgaatttgcagggtaggcataagtgtatagagaacgtgagtcgacagaattgtccgatttgtttagaggacatccatacaagcagggtggtcgcacacgttctcccctgtgggcacctgctgcatagaggatacaggtgcccgctgtgtatgcacagtgcactcgatatgacacgctattggcgccagctggatgatgaggttgctcaaacacccatgccctccgagtaccagaacatgactgtagacattttatgtaatgactgcaatggacggtccaccgtgcagtttcacattctaggcatgaagtgcaagatctgcgagtcctataacacagctcaggcgggagggcgtaggatatccctggatcaacaatag

SEQ ID NO: 31044 - DNA, 594 bp, synthetic construct
  source 1..594: mol_type = other DNA; note = Synthetic coding sequence
atgtggaccgctcgtggacctttccggagagaccggtggtcctcagaggatgaagaagccgctggcccttcccaggcccttagccccttgctgtctgacaccagaaaaatcgtctccgaaggagaactggaccagttggcccagattcgccctctgattttcaacttccacgaacagacagccattaaggattgtcttaagatcttggaagaaaaaacggcagcttatgacatcatgcaggagttcatgaccggcacctcgcattccgtgaagcagcttcagtttaccaaatggcccgaccatgggacccccgcaagcgctgattcctttattaaatacattagatacgcgaggaaaagtcacttgacaggtcctatggttgtgcactgcagtgctgggataggccgtacgggcgtgttcctgtgcgtggatgtggtattctgcgccatcgtgaaaaattgctctttcaatattatggacattgtggcccagatgagggaacagcgaagcggaatggtgcagacaaaagaacaataccacttctgttatgacatagttctggaggtgctgaggaagctgctgacactcgattag

SEQ ID NO: 31045 - DNA, 4203 bp, synthetic construct
  source 1..4203: mol_type = other DNA; note = Synthetic coding sequence
tgaccgccaccacctcccccacccatgtggaatccgatgatccccgcttttgacctgttccagggcaatcatggcttcgtggcccctgtcgtaacgaccgccgctcactggagatcagtaaattacactttccccccttctgtgatcagccacacatccccaactaaagtgtggcgcaataaagacggtacgtcagcatatcaagtacaggagacccccgtgtcccaggtggtcaggaaaaagaccagttatgttggcttggtgctggtgctactcagagggttacccggatccggaaaaagctttctcgctcgaactctccaagaagataatcctagtggggtgatactgtcaactgatgattacttttatataaacggccagtatcagttcgatgtcaagtatcttggcgaggcccacgaatggaaccagaatcgcgctaaagaagctttcgagaaaaaaatttcacctatcattatcgacaacaccaacctccaggcttgggagatgaagccctacgtcgctttatcacagaagcataaatataaggtcctgtttagggaacccgacacttggtggaaatttaaaccaaaagaactcgctaggcgcaatattcatggcgtttctaaggaaaagattacaagaatgctggagcactaccagcgattcgtaagcgtgcccatcattatgtcaagcagtgttcccgagaaaatcgagagaatagaattgtgcgcatactcttgcgaggaccgatccacatccccaagggatgatgaggatattatttcggaaaaagaggaaaacatactaagtctgtctctcaagcatttggaatttacggaggaaaagaatctagacgtgaccaaggagactatgctgccggagaacgtagcttacctgagcaatgcggacctcaataagaggcgaaaggaaataagcgacatgaaccccagcattcagagtgctcttatcctggagactccccacatgtattttagcgacagtgagtccaagctccaagctacagacaagtccgaaaatgagcaaattgagatggtggcagtgaaagggtactctaaaactgatacggactcttccatggaaagggtgtcgccatcaacttgctgctcagagaataatcaggaagattgcgacctagctaactccggccctctccagaatgaaaagagtagtcccggtgaaatcgtcgaggaacgggcaaccgtcaccaagaaggcgttcggcaagcagaaatcaaaatctaccctggagaaatttccgaggcacgaactgtctaatttcgtaggagactggcccgtagataagactataggccagcggacaaagaggaatagaaagacagagaaaactagtagcgttcaatcggacaagaaatacaattaccctcagagccacaaactggttaatagcgtttctgttaataccgattgtgtccaacagcggggttcccctcatgagagcgtcgaagatggacgcaagagtcagtgcgacgatgccagtgagcccctaaattcgtacaagtatgacgcctataaaaacatagataaaaacagcttcaatatcatgggggactggcccagctctgactcacttgctcagagggaacaccggtctagaatgcccaagaccggcctgagcgaacctaacctggagatcggtacgaatgacaaaatgaacgaaatcagtttgagcacggctcacgaagcctgttggggcaccagcagccagaaattgaagactctcggcagctctaacttagggtcttccgagatgctcctgtccgagatgacatgcgagtcacagacctgcctgagcaaaaaatcccacggccagcatacatcactccctcttacttttacaaactccgctcctacagtgagtggagtcgtggaaccacagacactcgccgaatgtcaggaacagatgccaaagagggatcccggaaaagaggtcgggatgtgtacccagaccgaaccacaagatttcgcactgctttggaagatcgaaaagaataagatttccatttcagattctatcaaggtcctgaccggacgcttagacgggttcaaaccaaaggtcttcaatattaacaccaaatctgatgtgcaagaggccatcccatacagggtgatgtatgacaaatcaacttttgtggaggagagcgagctgaccagtgccgatgagtctgaaaacctaaacatcctgtgtaaactgttcggctccttttctctggaggcattgaaggacctctacgagcgctgtaacaaggacattatttgggccaccagtttgctgcttgattccgaaacgaagctctgcgaggacaccgagttcgaaaattttcagaaaagctgtgatggcagccagatcgggcctttctccctcggactgaatctcaaagagatcatctcacagagaggtacattggagaacagcaatagccctgtccctgagttcagccacggcattgggatttcgaacgcagacagtcagtcaacctgtgacgcggaacgaggcaattcagagcaggccgagatgcgcgcagtgactcctgaaaatcatgaaagtatgacatcaattttcccaagtgccgctgtggggctgaagaataataatgacatactccccaactctcaggaggagctgctgtacagcagcaaacagagtttcccagggattctgaaagccacaactcctaaagatatgagtgaaaccgagaaaaacctggtggtgacagaaacaggggataatattcactctccaagccacttttccgatatatttaattttgtgtcatctacctcaaatttggaattaaacgaggagatctatttcacagacagcctggagatcaaacggaatgagaactttcctaaggactatgtaaaatttagcgatgaggaggaatttatgaacgaagacgagaaagaaatgaaagagattctgatggctggctccagcctgtccgccggagtgagcggagaggataaaacagaaattctgaatccaacacctgcaatggccaaatcactcacaatcgactgcctggaattagctctaccccctgagctggcgttccagctaaacgagctgtttggcccagtgggcatagatagtggcagcctgactgtggaggattgcgtggtgcatatcgacctcaatcttgctaaagtcatccacgagaagtggaaagagtccgtcatggagcggcagcgtcaggaagaagtctcctgcggcaagtttatgcaggatccttccttggttgggcatacggggctggataacccagagcagaagtcttcacaaaggactggaaagaagctcttgaagacccttactgcctctgagatgctgccactccttgatcactggaatactcagaccaagaaggtgtcccttcgcgagataatgagcgaagaaatcgctctccaggaaaaacataatctaaaacgcgagacactgatgtttgagaaagattgcgctactaagctgaaagaaaaacagctttttaaaatttttcccgcaatcaaccaaaacttcctggtggatatcttcaaagatcataactatagtctggagcatacagtgcagtttctcaactgcgtgctggagggcgatcccgtcaaaacagtggttgcacaggaattcgtgcaccagaacgagaacgtcacctcacatactggccagaagtctaaagagaagaaggattttgaatatcccgattacgacgattaccgcgcagaggccttcctgcatcagcaaaagagaatggagtgctattcgaaagcgaaagaggcttatagaatagggaaaaaaaacgtagccactttctatgctcagcaaggcaccctgcacgagcagaaaatgaaagaggctaatcacctagcggctatcgagatattcgagaaggtcaatgcctctcttttaccccagaatgtgctggacttgcacggtctccatgtggacgaggccttggaacatttgatgagggtgctggagaaaaagaccgaagagttcaagcagaacggagggaaaccctatctgagcgtgattacaggaagaggaaaccatagtcaaggaggcgtagcccgaatcaagccagccgtgatcaaatacttgatcagtcactccttcaggttttcagagatcaagcccggatgccttaaggtaatgttaaaatag

SEQ ID NO: 31046 - DNA, 237 bp, synthetic construct
  source 1..237: mol_type = other DNA; note = Synthetic coding sequence
atgctatgctggggctactggagcctggggcagcccggtataagcacaaacctgcagggcatagtggcagaaccccaggtgtgcggttttatttcagatcgctcggtgaaggaagttgcttgtggtggtaaccactcagtatttctgctggaagacggcgaagtgtacacatgcgggctcaacacaaagggccagctgggccacgagcgcgaaggaaacaagcccgagcagatttag

SEQ ID NO: 31047 - DNA, 738 bp, synthetic construct
  source 1..738: mol_type = other DNA; note = Synthetic coding sequence
atgaacggacgtgcagatttccgcgagcccaacgctgaggttccaagacccataccacacattgggcctgactatatcccaaccgaggaggaacgccgagtgttcgccgaatgtaatgacgagtccttctggtttaggtccgtaccactcgcagctacttcaatgctcattacacaaggccttatctccaaaggaatcctgagttcccatccgaaatatggctcaattcctaagctgattctcgcatgcatcatggggtacttcgctgggaaactgtcatacgtcaaaacttgccaggagaaattcaagaagttggaaaacagccccctaggggaggctctgagaagcgggcaagcccgaaggagttctccaccaggacactactatcagaaatcgaaatatgacagcagcgtgagcggtcaatcatctttcgtgacctcgcctgccgctgataatatcgagatgttgccccactatgaacctattcccttctccagctctatgaacgagtcagccccaacaggtatcacggaccacatcgtacagggacctgatccaaatttagaggaaagtccaaagaggaagaatattacatacgaggaattgcgcaataagaacagagagtcttatgaagtgagtttgacccaaaaaaccgatccttccgtaaggcctatgcacgagcgggtgcctaaaaaggaggtgaaggtaaacaaatatggtgacacatgggatgagtag

SEQ ID NO: 31048 - DNA, 2112 bp, synthetic construct
  source 1..2112: mol_type = other DNA; note = Synthetic coding sequence
atggaggcgctgcttgaaggaatccagaacagaggacatgggggtgggttcctcacttcttgtgaggctgaactgcaagagctgatgaaacagatcgacatcatggttgcccacaagaagtctgaatgggaaggcaggactcatgcactggagacgtgtctgaagattagagagcaagagctgaagtccctgagatcccagctcgatgttactcacaaagaggtgggaatgctccatcagcaagtagaagagcacgagaagataaaacaggagatgactatggagtataaacaggaactgaagaagcttcacgaggagttatgtatcctcaagagatcttatgagaagctccagaaaaaacaaatgcgcgaattccgagggaacacaaagaaccatcgggaagaccgcagtgagattgaacgattgacagcgaaaatagaggagttcaggcagaagagtttggactgggaaaagcagaggctcatctaccagcagcaggtgagcagccttgaagctcaacgaaaggctctggccgagcagtctgagatcattcaagcccagctggtgaaccgaaagcaaaaattggagagcgttgagctctcctcacagtctgagattcagcacctcagcagcaagttagaacgcgctaatgacacaatctgcgccaacgagttggagattgaaagacttacgatgcgggtcaacgacctggtgggaacctctatgaccgtcctacaggagcagcagcagaaggaggagaagctgagagagtctgaaaaactgctggaggccctacaagaggagaagcgggagcttaaggccgcactccagagccaggagaatttaatccatgaagccagaatccagaaagagaagctgcaggaaaaggtgaaggcaactaatactcagcatgctgtggaagccattcgcccaagggaggagagtctggccgagaagaagtacacgtcacagggtcagggggaccttgatagcgtactttcgcagctcaactttactcatacatccgaggacctgctgcaagccgaagtgacatgcctggagggatcgctggaatccgtatccgcaacctgcaagcagctttcgcaggaactaatggaaaaatacgaggagcttaagagaatggaagcacacaacaacgaatataaggccgaaatcaaaaagctgaaggagcaaatcctgcaaggagagcagtcctactcttccgctctggaaggcatgaagatggagattagtcacctgacccaggaactacaccaacgcgacataactattgcaagtacgaagggcagctcctctgatatggagaagcgcctccgggcagagatgcagaaagcggaggacaaagccgtggagcataaggaaatactggaccagttagaatccttaaagcttgaaaatcggcatttgagtgaaatggtgatgaagctcgagctgggcctccacgaggctaaggaaatttcactcgccgatctacaagagaattatatcgaggccttgaataaattagtttcagagaatcaacagctgcaaaaagatctgatgaatacaaagtctcaattagaaatcagtacccagatgtgtaagaagcagaatgaccggatctttaaacccacccacagcaggaccacggagttcaagaacactgaattcaagcctacacacggtcagcaccgacacgacggcatcaagaccgagcactataaaacagatttgcactccccacgtggacaagcctccgactccatcaaccctatgagtagggtgttaagcccactgtcgccacagatatctccatgcagttcaacaaggtcactgacaagttattcactgtgcaagacccatagcctgccttccgctctggacacaaatgaggctaactttagcgacacaatgtcagagagtatgaatgaccaggaggaattcatctccagctgttcacttcctgtatctccactcgggagtatcgccacacgattcctcgaggaagaagaactaagaagtcatcacatattagagcgattagatgcgcatatcgaggagctgaaaagagaatcagagaaaaccgtgaggcagtttacagctctcaagtag

SEQ ID NO: 31049 - DNA, 573 bp, synthetic construct
  source 1..573: mol_type = other DNA; note = Synthetic coding sequence
atggccggaaccgccagacacgaccgagagatggcaattcaggcaaaaaaaaaacttacgactgctaccgatcccattgagaggctccggctacagtgcctggcccgtgggagtgccggtattaagggtctgggcagggtgttcaggatcatggatgatgataacaaccgcaccctcgacttcaaggagtttatgaagggtctcaacgactacgcagtcgttatggagaaagaggaggttgaggaactatttagaagattcgacaaagatgggaacggaaccatcgacttcaacgaatttctgcttactttgcggccacccatgtcccgcgctagaaaggaagtcattatgcaggcctttcgcaaactggacaagacgggcgacggggtaatcaccatcgaggacctccgcgaggtttataacgcaaagcaccatcctaagtaccaaaacggtgagtggtcagaggaacaggtgtttagaaagttcctcgataattttgatagtccgtatgataaagacgggctcgtcacccctgaagagttcatgaattattacgccggtgtaagcgcatag

SEQ ID NO: 31050 - DNA, 231 bp, synthetic construct
  source 1..231: mol_type = other DNA; note = Synthetic coding sequence
atgacccccccacagcagcctccgcctttgcggagcgaacccggtaccctcggatccgctgctagcagctactcaccactggggttaaatggggttcccggatccatttgggatttcgttagcggttctttctccccatccccatcacctatcctctcagccggtccccctagctcatcatcagccagccctaacggcgcagagttagccagggtgcgcagacagttgtag

SEQ ID NO: 31051 - DNA, 108 bp, synthetic construct
  source 1..108: mol_type = other DNA; note = Synthetic coding sequence
atggccaccttggtcgtaaacaagctcggcgctggggtggactcaggacgacagggtagcagggggactgctgtggtcaaggtgctggaatgcggcgtgtgcgaatag

SEQ ID NO: 31052 - DNA, 477 bp, synthetic construct
  source 1..477: mol_type = other DNA; note = Synthetic coding sequence
atggaggccgacatcatcacaaatctgaggtgtagactgaaggaggctgaagaggagcggttgaaggcagctcagtacggtctgcagctggtagaatcccaaaacgagttacagaaccagctcgacaagtgcagaaatgaaatgatgacaatgaccgagtcttacgaacaggaaaaatacacactccaacgggaagtggagctgaagagcagaatgcttgagagccttagctgcgagtgcgaggcaatcaaacagcagcaaaagatgcatcttgagaaactggaggagcagctgagcaggagccacggacaagaagtgaacgagctgaagaccaaaatcgaaaagctgaaggtagagctcgacgaggccagattgagcgagaagcagctgaagcaccaggtggaccatcagaaggagcttttgtcctgtaaatctgaagagctgagggtgatgtccgaaagagtgcaggaaagctag

SEQ ID NO: 31053 - DNA, 393 bp, synthetic construct
  source 1..393: mol_type = other DNA; note = Synthetic coding sequence
atggcacagacagataaaccaacctgtatccccccagaactgcctaaaatgttgaaagagttcgcaaaggccgctatacgcgcacagccacaagaccttatccagtggggcgctgactattttgaggccctgtctaggggggagaccccacctgtccgggaaagaagtgagcgtgttgccctatgcaattgggccgagctgactccagaactgctgaaaatactgcattcccaggtggccggacgccttattatccgagccgaggaactggcccagatgtggaaagtcgtcaatctgcccactgatttgttcaactctgtgatgaacgtgggtcgctttaccgaggagattgaatggcttaagttcttggcattggcgtgcagcgcactttag

SEQ ID NO: 31054 - DNA, 693 bp, synthetic construct
  source 1..693: mol_type = other DNA; note = Synthetic coding sequence
atggaagctgacataatcacaaatctgcggtgccgtctgaaggaggccgaggaggagaggctgaaagcggctcagtatggcctgcagctggtcgaaagccaaaatgaattacaaaaccaactcgacaagtgccgaaacgagatgatgactatgacggaatcatacgagcaggagaaatatacgctacagcgagaggtggaactcaaaagccgaatgctggagtcactgagctgcgaatgcgaagctattaaacagcagcagaaaatgcacctcgagaaactggaggaacagctgagcagatctcacggccaagaagtgaatgaactgaagaccaaaatcgaaaaactgaaagttgagttggacgaagcccgtctgtccgaaaagcaactgaagcatcaggtagaccatcagaaagagctactatcctgcaagagcgaggaattacgggttatgtccgagagagttcaggagtctatgagtagtgagatgttggctctacagattgaactgaccgagatggagtcaatgaagacaacactgaaagaagaggtaaatgagctgcagtatagacaggagcaattagagctgctaatcactaatcttatgcgacaggttgaccgcctcaaagaggagaaagaggagagagagaaggaagccgtctcctactacaatgcactggaaaaggcaagatag

SEQ ID NO: 31055 - DNA, 639 bp, synthetic construct
  source 1..639: mol_type = other DNA; note = Synthetic coding sequence
atggcccagacagataagcccacttgcattccccctgagttgccaaaaatgctgaaagagtttgcgaaagcagcaattcgcgctcaaccacaggatctaatccagtggggcgctgactacttcgaagccctgtccaggggtgaaacccctcctgtcagggaaagaagtgagagagtggcactgtgtaactgggcagagctgacgcccgaactcctgaagatcctacactcccaggtagctggcagactaattatccgcgctgaggagttggctcagatgtggaaagttgtgaatctaccgactgacttgttcaactccgttatgaacgtgggccgatttaccgaagaaatcgagtggctgaaattcctggcccttgcctgtagtgccctgggcgtcaccatcacgaagaccctgaagattgtctgtgaagttctgtcgtgtgatcataatggaggactgccaaggattcctttctccacatttcaattcttgtatacatacatcgcagaggtagacggtgagatctgtgcatcccacgtgtcccggatgctcaactacatcgaacaggaggtcattggcccagatggcttaataacagttaatgattttacccagaacccgcgtgtgtggctcgagtag

SEQ ID NO: 31056 - DNA, 2844 bp, synthetic construct
  source 1..2844: mol_type = other DNA; note = Synthetic coding sequence
atgaatttcctgcgcggagtgatgggcggacagagcgccggtccacaacacaccgaggcagagacagtgcggggagctgccgatccaaaagttacttcctcatgcgggctcaaatttaggcacagctttcgcctcgtgaagcacattttgtaccatgtgacgattaacgtttatagcgatagtgaaatcattgggtacgccctcgatactctgtataacatcatcagcaatgaggaggaagaagaagtggaagagaactctacgcgccagtccgaggatttgggcagccaattcaccgagatctttattaagcaacaggagaatgtcaccctcctactgagtctcctagaagagttcgattttcacgtccggtggccgggagttaagctcctgacttcactcctgaagcagctaggcccacaggtgcaacagataatcttggtgtctccaatgggggtgagcaggttgatggacctcttggccgattcacgtgaagtaatccggaatgacggagtcctgctgcttcaggctctgacacgctctaatggagccatccagaagatcgtcgccttcgaaaatgcatttgaacggttgctagacataatctctgaagaaggtaattctgacggtggcatcgtcgtcgaagattgtctgatcctgctacagaatttactgaaaaataacaacagtaaccaaaattttttcaaagagggatcttacattcagaggatgaaaccatggttcgaggtgggcgatgagaacagtggctggtccgcgcagaaagtaactaacttgcacctgatgttgcagctagtacgcgttttagtctctccaacaaaccccccaggcgcaacaagctcctgtcaaaaggctatgttccagtgcggcttgctacaacagctgtgtaccattctgatggctacaggagtgcctgcagatatactcactgaaacaattaatacagtatctgaggtgatccgagggtgtcaggtcaaccaggattatttcgcttcagttaatgcaccatccaatcctcccaggccagcaatcgttgtactgctcatgtctatggtgaatgagcggcagcctttcgtgctccgttgcgccgtcctgtattgctttcaatgtttcctctataagaaccaaaaaggtcaaggagaaattgtgtcgacactgttaccttctaccattgatgccaccggaaacagcgtgtccgccggacagttgttgtgcggtggcctgtttagcactgacagcctgtcaaactggtgcgcagccgtggccttagctcatgctctgcaagaaaacgctactcagaaggaacagcttctgcgcgtgcagcttgccacctctattggcaaccccccagtttctctcctgcaacagtgtactaacatactgagccaaggctccaagattcaaacgcgtgtggggctcttaatgttactctgcacatggttatccaattgtcctatcgccgttacccacttcctgcacaatagcgctaatgttccattccttacaggtcaaattgctgaaaatttaggagaggaggagcagttggtgcagggtctctgcgccctgttgcttgggattagtatttacttcaacgacaattctctggagtcatacatgaaggaaaaactgaaacagcttatcgagaagagaatcggcaaagagaactttatagagaagctgggattcatcagtaagcacgagctctatagccgcgcatcccagaaacctcagccgaactttccctcccctgagtacatgattttcgatcatgagttcaccaaactggttaaagagttggagggagtaattaccaaggcaatctataaaagttctgaagaggataagaaagaagaagaagtgaagaaaactttggagcaacacgacaacattgtgacccactacaagaatatgatacgcgagcaggacctgcagttggaagaactgcgccagcaagtgtcgaccctgaagtgtcagaacgagcagcttcaaaccgccgtgacacaacaggtctcgcagatccaacagcataaagatcagtacaatctcctgaaaatccagctggggaaagacaatcagcatcaaggctcctacagcgagggagctcaaatgaacggaatccaacccgaagaaattgggcgtcttcgcgaggagattgaggaacttaaaaggaatcaagagcttctgcagagtcagttaacggaaaaggacagcatgatcgagaacatgaaatcctcacagaccagcgggacaaacgagcagagttcagcaatcgtatctgccagagatagcgagcaagtcgcagagttgaaacaggaactggcaactctgaagagccagctgaattcacagtcagtggagataacaaagctgcaaacagagaagcaagagttgttgcagaaaaccgaggctttcgctaagagcgttgaggtgcagggggaaaccgaaaccattatcgctacaaagactacggacgtggaaggacgactgtcagctcttctgcaagagactaaggagctgaagaacgagataaaagcactcagtgaggaacgcaccgccatcaaagaacagctggacagttcgaacagcaccattgcaattttgcagaccgaaaaagacaagttggagctggagataaccgattcaaagaaagagcaggatgatctactggtgctcctagcggaccaggatcagaaaattctgagcttaaaaaacaaactgaaggacctcggccatcccgtggaggaagaagacgaacttgagtctggggatcaggaggatgaggacgacgagtcagaggatccgggaaaagatctggatcatatctag

SEQ ID NO: 31057 - DNA, 1095 bp, synthetic construct
  source 1..1095: mol_type = other DNA; note = Synthetic coding sequence
atggtcaaactcttcattgggaatctaccacgggaagctaccgaacaggagattcgctccttgttcgaacagtatgggaaggtgcttgagtgtgacatcatcaagaattacggctttgtccatatcgaggataaaacagcagcagaagatgccataaggaacttgcatcactataagcttcacggtgtaaacatcaatgtagaagcgagtaaaaacaagtccaaaacttctacaaaactccacgtgggtaacatcagccctacctgcacaaacaaagagcttcgggctaaattcgaagaatacggaccagtcatagaatgcgatattgtcaaggactatgcatttgtgcatatggagcgagctgaggacgcagttgaggctatcaggggtcttgataatacagaattccagggcaaaaggatgcacgtgcaactgtctacctcaaggctcagaaccgcaccaggaatgggcgaccaaagcggctgttatcggtgtgggaaagagggtcactggagcaaggaatgcccaattgatagaagcggcagggtggccgacctcacagaacagtacaatgaacagtacggtgctgtgaggaccccatacactatgtcttacggtgatagtctgtactacaacaacgcatatggggctcttgacgcctattacaaaaggtgcagagcggctcggagctacgaagcagtggccgcagccgcagcgtccgtgtacaactacgccgagcaaacattatctcagttgccgcaagtccagaataccgctatggccagccatttaacatcaacatccctagatccctacgaccgacacctgttgcctactagcggcgctgctgctaccgcagcggcagccgcagcagccgctgctgctgtcacggccgcatctacctcttactacggccgtgatcggagccctctccgaagagccacagctcctgtacccaccgtgggggaggggtatggctatggccacgaatccgaattgtcacaagcaagtgcggctgccagaaattctctctacgacatggcccgttacgagcgagagcaatatgctgatagggcccgatactccgcgttttag

SEQ ID NO: 31058 - DNA, 1236 bp, synthetic construct
  source 1..1236: mol_type = other DNA; note = Synthetic coding sequence
atgattgttaatgactacgagggcaacgatagcgaagctgaggacctgaattttagggaaaccctaccaagtagctcccaggagaacactcctagaagcaaagtgtttgagaacaaagtaaactccgagaaggtgaagcttagtctcagaaatttcccgcataacgactatgaggacgtttttgaagagccctctgaaagcggaagcgatccatccatgtggaccgcacgaggaccgttcagaagagatcgatggtcgagtgaggacgaggaggccgctggaccttctcaggccctgtccccactgctgtccgatactaggaaaatagtgtcagaaggggaactggaccaactggcccagatccggccactaatcttcaattttcacgagcaaactgctatcaaagattgccttaaaatcctggaagagaaaactgctgcctacgatatcatgcaggagttcatggctcttgaactgaaaaatctgcccggagagttcaacagtggcaatcagccttccaatcgggagaaaaatcgctacagagatatcctcccatacgactcgacgagggtgcctctgggtaagagcaaagactacatcaatgcctcttatatacgcatagttaattgcggtgaggaatacttctatattgccacgcagggacccctgctgagtaccatcgatgacttctggcagatggtcctggagaataactccaacgtcatcgccatgattacgcgcgagatcgaaggtgggatcatcaagtgctaccactactggccaatttcgttaaaaaagccccttgaactgaaacatttcagagtgttccttgagaattaccaaatactgcaatattttataattagaatgtttcaagtggtggaaaaatccacggggacttcccacagtgtgaaacagttgcagtttacaaagtggcctgatcacgggacccccgcaagtgctgactcttttattaagtatatccgatatgccagaaagagccacctaacaggtcctatggtggtccactgttcagcgggaatcggccgaaccggggttttcttgtgtgtagacgtggtgttttgtgcaatagttaaaaactgcagtttcaatatcatggacattgtggcccagatgcgtgagcaacgctccggaatggttcagaccaaggagcagtaccacttttgttacgatattgttctggaggtactgcggaagctgttaaccttagactag

SEQ ID NO: 31059 - DNA, 810 bp, synthetic construct
  source 1..810: mol_type = other DNA; note = Synthetic coding sequence
atgatcgtgaacgactacgaagggaatgacagcgaggccgaagacctcaacttccgcgagacactcccatccagctcacaggagaatacacctaggtccaaggtgtttgagaataaagtgaattccgagaaggtcaagctcagtttgcgcaactttccccacaacgactatgaagacgtgtttgaggagccttctgaatcgggatctgatccttcgatgtggaccgccagaggcccattccgccgtgaccggtggtccagcgaggatgaagaagccgctggacccagtcaggccctgagtcccctactttctgatacccgtaaaatcgtgtctgaaggcgagcttgatcaactagcccagattcgacccttaattttcaattttcacgagcagacggcaattaaggactgtctgaagattttagaggagaaaacggcggcttatgacattatgcaggagtttatgacgggtacttctcacagcgtgaagcaactgcagtttacgaagtggcctgaccacggaactcccgctagcgccgattcatttattaaatacatcaggtacgcacgtaaaagtcacctgacaggaccaatggtcgtccattgttccgctggtatcggtcggactggagtttttttgtgcgtagacgtggtgttttgcgcgattgtgaaaaactgctctttcaacattatggacatcgtggcacagatgagggaacagagaagtggaatggtccagactaaagaacaataccacttttgctatgatatagtgctggaggtcctcagaaaactgctgaccctcgactag

SEQ ID NO: 31060 - DNA, 360 bp, synthetic construct
  source 1..360: mol_type = other DNA; note = Synthetic coding sequence
atggcttcgcagctgcaagttttttcaccaccatcagtgagttcaagcgctttttgttccgctaagaaactgaagatagagcctagtggttgggacgtgtctggccagtcgagcaatgacaaatactacacacatagtaaaacgctgccggctacacagggacaagctaattcatctcaccaggtcgccaacttcaacatccccgcttacgaccaaggcctcttactgccagcaccagcagtagaacatatcgtggttaccgccgcagattcttcaggctccgcggctacctctacgtttcagtcatcccaaaccctgactcacaggagtaatgtttcactgcttgagccgtatcaatag

SEQ ID NO: 31061 - DNA, 339 bp, synthetic construct
  source 1..339: mol_type = other DNA; note = Synthetic coding sequence
atggctactggcgatttaaaacgcagccttcgaaatctcgagcaagtactgaggttgctaaactatcccgaagaggtcgattgcgttggactcattaaaggggaccccgctgcatccctgccgatcatttcctactcctttacaagttactcgccctacgtgaccgagctgattatggagagcaatgttgagcttatcgccaaaaatgacctgagattcattgatgcagtatataaactgctccgtgatcagttcaactacaaacccatcttaaccaagaagcagttcatccagtgtgggtttgctgagtggaaaatccaaatcgtatgtgatatctag

SEQ ID NO: 31062 - DNA, 54 bp, synthetic construct
  source 1..54: mol_type = other DNA; note = Synthetic coding sequence
atgaagcgtggtcgcttgccatcttcctctgaagacagcgatgacaatgggtag

SEQ ID NO: 31063 - DNA, 810 bp, synthetic construct
  source 1..810: mol_type = other DNA; note = Synthetic coding sequence
atgaatcaagaggacctggaccctgattctacaactgacgtcggggacgtcactaataccgaggaagaactcatccgggagtgtgaagagatgtggaaggatatggaagagtgccagaacaagctgagcctgattggaactgagacgttgaccgatagcaacgcccagctgtccctcctgatcatgcaggtcaaatgtctcaccgcggagctttctcaatggcagaaaaagactccagaaaccatcccgctgactgaggatgtcctcattacactcgggaaggaagaatttcagaagcttaggcaggacctggagatggttttgtccacaaaagaaagcaagaatgaaaagcttaaagaggatctcgaaagagagcagcgctggttagacgagcaacaacagattatggagagcttaaacgttctacactctgagctgaagaataaagtggaaaccttttccgagagtcgtatattcaatgaactgaagacgaagatgctaaacattaaggaatacaaggagaaattgctgagcacactgggcgaatttttagaagaccactttcccctgccagacagatcagtgaaaaaaaagaagaagaacattcaagagtctagcgtgaatctgatcaccctccatgagatgctggaaatactcattaaccgactcttcgatgtacctcacgacccctatgtgaaaattagtgactctttctggccgccatacgtggaactactgctccgtaatggcatagccctgcggcaccctgaagatcctacccgaattcgcttggaggcgttccatcaatag

SEQ ID NO: 31064 - DNA, 339 bp, synthetic construct
  source 1..339: mol_type = other DNA; note = Synthetic coding sequence
atgaacgggagggcagacttcagggagcccaatgccgaggtccctcgcccaatcccccatataggacctgattacatccccactgaggaggagaggcgggtcttcgccgaatgcaatgatgagtccttttggttcaggtctgtacctctcgccgcaaccagcatgctcattacgcaggggctcatctctaagggcatcctatcttcgcacccaaaatacggctccatcccgaagctgattctggcgtgcattatggggtattttgcgggaaagctcagttatgtgaaaacatgccaggagaagttcaagaagctggagaacagtccattaggggagtag

SEQ ID NO: 31065 - DNA, 687 bp, synthetic construct
  source 1..687: mol_type = other DNA; note = Synthetic coding sequence
atggaggagcagccccaaatgcaagatgcggatgagcccgcagacagcggtggcgaaggccgagccggtggcccacctcaggtcgctggggctcaggccgcttgttccgaggacagaatgacactcctcctcaggctgagagcccagaccaagcagcagctgttggaatataaatctatggtggatgccagcgaagaaaagacacctgagcagatcatgcaggagaagcaaattgaggcaaagatcgaggatctggagaatgagatcgaggaagtcaaggttgcattcgaaataaagaagcttgcccttgattctgttctcatggacaacatgaaacacttattggagctgaacaaacttatcatgaagagccaacaagaatcatgggacctggaggagaagcttctagatatacgaaaaaagaggttgcagctcaagcaggcgagcgagtccaagctgttggagattcaaaccgagaagaacaagcagaagattgatctggattccatggaaaatagtgagagaatcaagattattcgccagaatctccagatggagataaagatcactaccgtgatccagcacgtctttcagaacctgattctgggatcaaaggtgaactgggctgaagatcctgcccttaaagaaatcgtcctgcagctcgaaaaaaatgtggacatgatgtag

SEQ ID NO: 31066 - DNA, 2352 bp, synthetic construct
  source 1..2352: mol_type = other DNA; note = Synthetic coding sequence
atggccaagtataatactggcggtaaccctacggaagatgtaagcgtcaactcaagacctttcagggttaccgggccaaacagctctagcggcattcaggctcggaagaatctgtttaacaaccagggaaatgcctctccccctgccggtccgagcaatgtgcctaaattcggatcccctaaaccgccagtagctgtaaaacccagtagtgaagagaaacctgacaaagagccaaaaccgccatttctgaagccaacaggcgcagggcaaaggttcggaactcctgcttcccttaccacaagagaccccgaggctaaagtgggatttctgaaacccgtaggcccaaaacccattaacttaccaaaagaagatagcaaacccacctttccctggccacccggaaacaagccaagcttgcactccgtgaaccaagatcacgatctcaagcccttgggacctaaatctggaccaactccacctacatctgagaacgaacagaaacaagcatttcccaagctgaccggagtgaagggcaaatttatgtcagcatcacaggaccttgagccaaagcccttgtttccgaagcctgcattcggccagaagcctccgctgagtacggagaactctcatgaggatgagtctcctatgaagaacgtctctagctctaaagggtcccctgcccctctgggcgtacgctcaaagagcggcccattgaagccagccagagaggactccgagaacaaagaccacgccggagagatcagcagcctccccttcccaggcgtcgtgttgaagccagccgcatcccggggagggcctggtctcagcaagaacggagaagagaaaaaagaagatagaaagatcgatgccgctaagaatacattccagtctaagattaaccaggaggagctggcttccggcactcctccagcccgtttccccaaggcgcctagtaagcttactgttggaggcccttggggccagagccaggagaaagagaaaggagataaaaactctgccacccccaagcagaagcctctgccaccattgttcactctcggaccaccgccacctaagccaaaccgccctcccaatgtcgatctcacgaagttccacaaaacaagtagcggcaacagcacaagtaaaggccagaccagttatagtacgacgtccctgcctcctccacccccatctcaccccgcatcccaaccaccactgcccgcttcacaccctagccaacctcccgtgccaagtctaccccctcgaaacattaaaccgccatttgacctgaagtcgcctgtgaatgaagacaatcaagatggtgttacacatagcgacggagccggtaacctagacgaagaacaagactccgaaggcgagacctatgaggacatagaggcaagcaaggagcgcgagaagaagcgcgagaaggaggaaaaaaagcggctggaactcgaaaaaaaggagcagaaagaaaaggagaaaaaggaacaggagatcaaaaaaaagttcaaactgaccggccctatccaagtgatacatctagccaaggcttgctgtgatgtcaaggggggtaaaaatgaattgagctttaagcaaggggaacagattgagatcattcgtatcaccgataatccagagggcaaatggctgggtagaacagccaggggctcttacggttatatcaaaacgacggccgtagagatcgactacgactctctcaagctgaaaaaggattccttgggcgcaccctcaaggcctatcgaagatgatcaggaggtgtatgacgacgtggctgagcaggacgacatatccagtcatagtcagtccggatcggggggtattttcccaccacctccggatgacgatatatacgacggcattgaggaagaggacgccgatgacgggtttcctgctccgcctaagcaactggatatgggggatgaggtgtacgatgatgtggacacctccgatttccctgtgtccagcgccgagatgtctcagggaaccaacgtcggcaaggcaaaaaccgaggagaaggatctcaaaaaactgaagaagcaggaaaaagaagaaaaagatttcaggaaaaagtttaagtatgatggggaaatccgggtcctgtacagtacgaaagtcacaacctccataactagtaaaaagtgggggacacgggacttgcaggtgaagccgggagagtcccttgaggtcatacagaccacagatgacacaaaggtcctgtgccggaacgaggagggcaagtacggctacgtcctccggtcttaccttgccgataatgacggggaaatctacgatgacatcgcagacggatgcatctacgacaacgactag

SEQ ID NO: 31067 - DNA, 393 bp, synthetic construct
  source 1..393: mol_type = other DNA; note = Synthetic coding sequence
atgatgctgggaaccgaaggaggagagggctttgtggtgaaagtgcgcggattaccttggtcttgttctgctgatgaagtccaaagattctttagcgactgtaaaatccagaacggcgctcagggtatccgctttatctacaccagggaagggaggccaagcggtgaggcttttgtggagctggaatctgaggatgaggtcaagctcgcattaaagaaagaccgagaaacaatggggcatcgatatgtcgaagtgtttaaatccaataacgtcgaaatggattgggtgttaaagcacaccggccctaattcacctgataccgcgaatgacggcttcgtgcggctgcggggtctccctttcggatgttctaaggaagagatcgtgcagttctag

SEQ ID NO: 31068 - DNA, 267 bp, synthetic construct
  source 1..267: mol_type = other DNA; note = Synthetic coding sequence
atggaggcagatatcattactaacctccgctgccgactgaaagaagccgaagaagagcgcctcaaggccgctcagtacggtctgcagttagtggaatctcagaatgaactgcagaaccaacttgataagtgcagaaacgagatgatgaccatgaccgaatcatacgagcaggaaaaatacacactccaacgggaagtcgagctcaagtcgaggatgcttgagagcttgtcatgcgagtgcgaagccattaagcagcagcagaagtag

SEQ ID NO: 31069 - DNA, 1902 bp, synthetic construct
  source 1..1902: mol_type = other DNA; note = Synthetic coding sequence
atgaaggctataaaaaaatctcttactgaggaagaatacctctacctggactttagccatcagaccgagggctgtatcttccctctgcacacttcggtaactttgtttttgttgtcctactgtgactgcaagatctttaaaatatgtcttgtcgtaacgaaagaagtcagcagagatagctctctgctgcgggatgatctgatccaggatgtggagatccagataatctcgcgccaggagttgccacctatcgtacaaaattgctgtctgccagccgtggtcgaacgctctgacaacttttgtcgtgccggacttgccgtagttctgaggcatatcatccagaagtcctacgaggccgaccctctgaaaaaggagctgttggagcttctgggtttcaagaaaacttgcctcaaggcctgcgccgaggtcagccagtggacgcgcctatgtgaacttaccatccccctggcgatcgagaacttcctccgtgagtcctccgatcagccaccaacaatacccgttgaaatcctccagctggagaagaaactctcagaacctgttcgagttcacaatgacgacaagctgagacgccagaaactcaaacagcagaaggccgatggagtgggccctcccctaaccaagggcaaggccaagtccaaggtacatacccaggaaactagcgaggggcttgatagttctagcaagtctcttgagttgaaagtggcattttcgaaactgactgtacaggaggaaccggctacaaccaatcgggagccaagccatatccgaaaagctaaggctagtgatttgccgccactcgagcacgtctttgccgaaggcctctattttacactggcagacatcgtgcttctgccctgtatacaccactttctggttattatcagtcgcaagttctcagagaagctggtcgagttccctctcctggcgagctggtatcagcgcatccaggaagtccccggagtgaaaacagctgccagcaagtgcggaatccaattcctccatcttccaaagctgctgactacttcgactgaacagcacccaaacttgtgtgaggtgcccggagttgaggaacagagcgaccccctgttcataggcggtcccaggcccacaatggctaagctgatggagaagggtatagaggttatgttcagccctcatccttgtcccacatggaccctggattggaacgtgctgcctgcagcggtgtcgcctaaggaaggtaagatgagctctgatcgcgctctgcgcaagcaacagcaattaaacaacctggtgtatgtggtgaccaatcaagccaagcctggagaccgcatcgtggacttttgctctggcggaggtcatgtcggcattgttctggcgcacatgctgccttcatgtcaagtgacactaattgagaacaaggaactgagcctcattcgagctaagaaacgcagtgacgagcttggactgagcaatatctggtttattcaggctaacatggaatacttcaccgggatgttcaatatcggagtggcgctgcatgcctgcggagtggctactgatatggttatcgaacattgtatcaaaacaagagcttctttcgtgacatgcccttgttgctacggttttatacagaacacatccaaatttaactttccaaaaagcgaacaatttaagaagacactatcttacaaagaacatatgatcctgtgccggtttgccgatcaaactgcggtccagttgccaccccagcggaggctgattgggaagcaatgtatgtgcctggtcgatctggatcgcgctcgggctgcagaggagtgcggatacagtgtccaggtaattagtatggaacccgaatcctgtagccccaagaacaacatgatcgtgggcgtaccgatatag

SEQ ID NO: 31070 - DNA, 597 bp, synthetic construct
  source 1..597: mol_type = other DNA; note = Synthetic coding sequence
atggctacaggtgacctgaagcggtcgctgaggaacctagaacaggtactcagactcctcaattacccagaagaggtggactgtgtcgggcttataaagggggatccagccgcaagtctgcccatcatcagttatagcttcacttcttacagcccttatgtgaccgagttaataatggagagtaatgttgagctcatcgccaagaatgatctccgcttcatcgatgcggtctacaaactgctaagagaccaattcaattataaaccaattctgaccaaaaaacaattcattcagtgcggttttgcagaatggaagatccagattgtctgcgacatattgaactgtgtgatgaagaagcacaaggaacttagctctctacaaaagatacccagtcagcaacggaagaagattagttccgggaaaagtgaaccaccgctaggcaatgagaagattagcgcagaagctgtaggagttgacatatctggacgatttatgacatcaggcaagaagaaggcagtcgtgatccggcacctgtataatgaggataacgttgacatcagtgaggatacactgagtcctatcactgatgtcaattag

SEQ ID NO: 31071 - DNA, 336 bp, synthetic construct
  source 1..336: mol_type = other DNA; note = Synthetic coding sequence
atggtgatggagaaaccctcaccccttcttgtgggaagggagtttgtcaggcagtattacactctcctgaacaaggctcccgagtatctgcatagattctatggcagaaacagctcatacgtccacggaggcgtcgacgctagtggcaagccacaggaggctgtctatggacagaatgacattcaccacaaagtgctgtctctgaacttttccgagtgccacacaaagatacgccatgtggacgcccatgccacactgtcagacggggtggttgtgcaagttatggggctgctctcaaattccggacagcccgaacggaagtttatgcagacgtag

SEQ ID NO: 31072 - DNA, 681 bp, synthetic construct
  source 1..681: mol_type = other DNA; note = Synthetic coding sequence
atgtccagtcctcgcgattttcgagcggaacccgtgaacgactatgaaggaaatgacagcgaagccgaggacctcaatttccgggaaaccctcccttcttcgagccaggagaatacaccacggagcaaagtgttcgagaacaaagttaatagcgagaaagtgaaactgagcctccggaattttccacacaacgattatgaggatgttttcgaggaaccatcggagtcgggttccgatccctctatgtggactgccaggggtccatttcggagagaccggtggagctccgaagacgaggaagccgcagggccttcccaggccctgtcacctttgctctctgacacccgaaagatagtcagtgagggcgaacttgatcagctggcacaaatcaggcccctcattttcaactttcatgaacagaccgcaataaaggactgcctgaaaattctcgaggaaaaaactgccgcttacgatatcatgcaggagtttatggctcttgagttaaaaaatctccccggtgagttcaactctggcaatcagccctccaatcgggagaagaatcgctacagggacatcctcccttttcagcatcacggctacagcggtccaaatgaaagaactaccttctggcacggctccaatgaaggggcagttagcctgctgctgagatactgcgcctag

SEQ ID NO: 31073 - DNA, 1872 bp, synthetic construct
  source 1..1872: mol_type = other DNA; note = Synthetic coding sequence
atgtccgacgaggtcttttctactacactagcctatactaaatcgccgaaggtgacgaagagaacaacattccaggacgaactgatccgcgcaataacagcccgttccgccagacagcggtcgtccgaatacagtgacgatttcgatagcgatgaaattgtctcactcggcgatttctctgacactagcgccgacgagaattctgtgaacaaaaaaatgaacgattttcacatcagcgacgacgaggagaagaaccccagcaaactgctcttccttaagacgaacaagagcaacggcaatatcacaaaagacgagccagtatgtgcaattaagaacgaggaggagatggctccagatggatgcgaggatatagtggtcaagagtttctcagagtcacagaataaggacgaggaattcgaaaaagacaaaatcaaaatgaaacccaaaccaagaatcttgtcaatcaagagcacaagttccgctgagaacaattccttagacacagatgaccattttaagccatcaccaagacctaggagcatgctcaaaaagaagtcacacatggaggagaaagacggattggaggataaagaaacagctctgtctgaggaactggagctgcactctgccccaagcagcttgcctacgcctaacggtatccagctggaagccgaaaagaaagccttcagcgaaaacctcgacccagaagatagctgtctaacgtccttggcatcctctagcttaaaacagattttgggagactccttctcccctggcagcgaaggaaatgcatctggaaaagcggaccatgtgacaacagcggtcgagaagagcaaggagagccaggtgactgctgacgatctcgaggaggaaaaagccaaagccgagttgatcatggatgacgacaggaccgtcgacccgctgctttctaagtcacagtcgatattaatctctacctccgctaccgcttctagcaaaaaaacaatcgaagatcgcaatattaaaaacaagaaatcaacaaacaaccgcgcatcgtcagcctccgcccgtctaatgacatctgagttcctgaaaaagagctcctccaaaaggagaacaccaagcactacaacttcttcacactacctgggcacactgaaggtgctggaccaaaagccctcccagaaacagagcatcgagcccgaccgagccgataacattagagcggctgtatatcaggaatggctggaaaagaaaaacgtttacctccacgagatgcatcggattaaacgcatagaatcagaaaacttgcgaatccagaatgaacaaaaaaaggcagcgaagagagaggaagccttagcatcctttgaggcttggaaggcaatgaaggaaaaggaggcaaaaaaaattgcagccaaaaaaagacttgaggaaaagaacaaaaaaaagaccgaagaggagaacgctgccagaaagggagaagccttgcaggcctttgagaagtggaaggagaaaaagatggagtacctgaaagagaagaatagaaaggagagagaatatgaacgcgctaagaagcagaaagaggaggaaacagtggccgaaaagaaaaaggacaatttgacagctgttgaaaagtggaacgaaaagaaggaggcttttttcaaacagaaggagaaggaaaagatcaatgagaagcgaaaggaggagctgaaaagggcagagaagaaagacaaagacaagcaagccataaatgaatacgaaaaatggctcgaaaacaaagagaaacaagaacgtatcgagcgtaagcaaaagaagcgccactcgttcctggaaagtgaagctttgcctccatggagcccgccaagccggaccgtgttcgctaaagtgttttag

SEQ ID NO: 31074 - DNA, 255 bp, synthetic construct
  source 1..255: mol_type = other DNA; note = Synthetic coding sequence
atgatgcttggaacagagggcggagagggctttgttgtcaaggtgaggggactgccctggtcctgttcagcagatgaagtgcagagattcttcagtgactgcaagattcagaatggtgcccaggggatacggtttatctatacaagagaaggcaggccatctggtgaggcttttgtcgagctcgaatctgaggacgaggtgaagctggctcttaagaaagatagggaaacaatgggtcacaggtatgttgagtag

SEQ ID NO: 31075 - DNA, 993 bp, synthetic construct
  source 1..993: mol_type = other DNA; note = Synthetic coding sequence
atggatcagggagatactccaaccctggaggaggacctaaaaaagctacaattatctgagttttttgatatttttgagaaggaaaaagttgataaagaagctttggctctctgtacagatagagacctccaggaaattggaatccccctcgggcctcggaaaaagatcctgaactatttttctacaagaaaaaattccatgggcatcaaaagaccagctccccagcctgcttcgggagctaatattccgaaagagtccgagttctgctcctctagtaacacacggaacggagattaccttgacgtgggaatcggccaggtcagtgtgaaatatcctcgcctcatctacaagccggagatctttttcgccttcgggtcccctattgggatgttcctgactgtgcgtggactcaaacgcatcgaccccaactacaggtttcctacgtgcaagggcttcttcaacatttaccatcccttcgaccctgtggcatataggatcgagcctatggtggtgcctggtgttgaattcgagccaatgctgatacctcatcacaagggccgtaaacggatgcacctagagcttcgagaaggactcactagaatgtccatggatttgaagaacaatctccttggctccttaagaatggcctggaagtcttttaccagggctccatatcccgctctccaagcttcggaaaccccggaggagacggaggcggagcctgaaagcacaagcgagaaacctagcgatgtgaatacagaagagaccagcgtggcggtgaaggaggaggttctgcctataaatgtagggatgctgaatgggggacagagaatcgattacgtactgcaggagaaaccaatcgagagttttaacgagtacctgtttgcattgcagagtcacctgtgctactgggagtctgaggacacagtgctcttggtgttgaaagagatttaccagacccagggcatttttctggatcagccgctacaatag

SEQ ID NO: 31076 - DNA, 1383 bp, synthetic construct
  source 1..1383: mol_type = other DNA; note = Synthetic coding sequence
atggatagcgagctgatgcatagtattgtaggttcgtaccataagccacccgaacgagtgtttgtccctagctttacacagaatgaaccgagtcagaactgccacccagctaatctggaggtgaccagcccaaagatcctccattctcctaactcacaagccctgattttagctctgaagacactgcaggagaaaatccaccgcttggagctggagcgtacacaggccgaagataatctgaatattctctcacgagaggcagcacagtacaagaaagctttggagaacgagactaacgaacgtaatctggcccatcaggaactcataaaacagaaaaaagacatctccattcaactctcgtccgcgcaatcacgctgtactctcctggagaagcagctggagtacacgaagcggatggtcctgaacgtggagcgggaaaagaacatgatattggagcagcaagcccagctgcagcgcgagaaggagcaagaccagatgaagctgtatgccaagctggagaaactggacgtactcgaaaaggagtgttttaggctgactacaacccagaaaactgcagaggacaaaattaagcatttggaggaaaaactcaaggaggaggagcaccagagaaagctattccaggataaggcaagtgaactgcagaccggcctggaaatatcaaagataattatgagttcagtatcaaacttaaaacactccaaggagaagaaaaaatctagtaaaaagacgaaatgcattaaaagacgccctccctggcagatttgttcaaagtttggcgctctaccatttgtggctgagaagatgcgccagcatagagacccacacatccttcaaaagccatttaatgtgacagagacccgatgtttacccaaaccaagccgcactacaagttggtgtaaggcgatcccaccagactccgaaaagtctataagcatctgcgacaacctgtcagagctcctgatggccatgcaggatgagctcgatcaaatgtccatggagcatcaggagctcctgaaacagatgaaagagaccgagtcccattcagtttgcgacgatatcgagtgtgagcttgaatgtcttctgaagaaaatggagattaagggggagcagatatccaagttgaagaagcaccaggattcagtgtgtaagttacagcaaaaggtccagaatagcaagatgagtgaggcatctgggatccagcaggaggactcttatcccaagggaagcaagaacatcaaaaactccccaaggaagtgcttgaccgacaccaacctgtttcagaaaaactccagcttccaccctattcgagtccataatctgcagatgaaactgcgccgagatgacattatgtgggagcagtag

SEQ ID NO: 31077 - DNA, 1068 bp, synthetic construct
  source 1..1068: mol_type = other DNA; note = Synthetic coding sequence
atgactggcagcgctgcagacacacaccgatgcccacacccgaagggggctaaaggtacgaggtcccgatcaagccacgcaagaccagtctctctggctacgtccggcggatccgaggaggaagacaaggacggcggagtcttattccatgtcaacaagtccggtttcccaatagactctcacacttgggaacggatgtggatgcacgtcgccaaggttcaccccaaaggcggtgaaatggttggcgcaattaggaatgccgcattcctggctaagccttccatcccacaggtgccaaactatcggctgtcaatgactattcccgactggctgcaggctatccagaattatatgaaaacacttcagtataaccatacaggcacgcaattctttgagatcaggaagatgcgaccactttccgggctgatggagaccgccaaggagatgacccgagaatccctgcctataaagtgcctggaagccgtgatcctgggtatatatctgaccaatggccaaccatccatcgagcggttcccaatcagcttcaagacgtattttagtggcaattacttccatcacgttgtgcttgggatttactgtaatgggaggtatggcagcctaggcatgtctagacgggctgaactcatggataaacctctgacctttagaacattgtcagacctcatctttgattttgaagactcttataagaaatatctgcacacagtgaaaaaggtgaaaattggattgtacgttcctcacgaaccccactccttccagccaatcgaatggaagcagttggttctgaatgtcagcaaaatgcttcgggctgatatcaggaaggagttagagaagtacgctcgcgatatgagaatgaaaatactaaagccagccagtgcccactcccccacacaagttagaagccgcggaaagtccctgagcccacgccgacgtcaggcttctcctccaaggcggctgggtcgccgagagaaatctcccgcactgcccgagaagaaggtggccgatctcagcactctcaacgaagtgggataccaaatcagaatctag

SEQ ID NO: 31078 - DNA, 384 bp, synthetic construct
  source 1..384: mol_type = other DNA; note = Synthetic coding sequence
atggcaagtaaccataaatcatcggccgcacgcccagtgagccgcggtggtgttggtctgaccgggagacccccatcagggatccgtcctctcagcggcaacattagggtggccactgccatgccacccggaactgcgagacctggatcacgcggttgccccatcggaaccggtggcgtgctctcgtctcaaatcaaagttgcccataggccagtgacccagcagggtttgactggaatgaaaacggggacaaaaggtcctcaaaggcagattctcgacaagtcatactaccttgggcttctcagaagtaagatcagcgaattaactactgaagtgaacaaattgcaaaagggcattgagatgtataatcaggagaattcatag

SEQ ID NO: 31079 - DNA, 510 bp, synthetic construct
  source 1..510: mol_type = other DNA; note = Synthetic coding sequence
atgcacaaactgcagtctggtatcggcaggctaattcttaaagaggagatgaaggctaggagttcctcatacgctgacccttggactcccccaaggtctagtacgagttccagagaagctctgcacacagctgggtatgagatgagccttaacggctctcctagaagccactacctggccgactccgatccactcataagtaagtctgccagtctaccggcatatcggcgtaatggccttcacaggacgccctccgcagatttatttcattatgacagcatgaatgctgtgaactggggaatgcgagagtataagatatacccttatgaactgctgctggtgactactagaggacgtaatagactaccaaaagacgtagatcgaacccgcctcgagcgccaccttagccaggaagagttctatcaggtttttggaatgaccattagcgagttcgatagactggcactttggaagcggaacgaactgaaaaaacaggcccgtctgttctag

SEQ ID NO: 31080 - DNA, 144 bp, synthetic construct
  source 1..144: mol_type = other DNA; note = Synthetic coding sequence
atggcatccgtcttgagtaggcggcttggtaaacgctccctcttgggggcacgggtgcttggtccctcagcttccgagggaccctctgctgccccaccgagcgaacctctgctggaaggggctgcccctcaaccgtttacctag

SEQ ID NO: 31081 - DNA, 558 bp, synthetic construct
  source 1..558: mol_type = other DNA; note = Synthetic coding sequence
atggatgactcaatcaataataggtttagttatgtgacgcatgaggacatttgtaactgtttcaatggggacaccctgctggctatccaggctccatctggcacacagctggaggtgccaatccccgaaatgggtcagaacggacaaaagaagtaccaaattaatctcaaatctcactcgggccctatccacgtattactcatcaataaggaaagttctagctctaagcctgtcgtgtttcctgttccgcctccagacgacctgacccaaccttcctcgcagagcctgactcctgtcaccccccagaagagcagcatggccacccagaatctgccagagcaacatgtgtctgaaagatcccaagcacttcaacagacatccgcgactgacatctcaagcgccggatctataagcggcgacatcattgatgagctcatgagctctgacgtattccctttgcttagattgtcgccaacgcccgctgacgactacaattttaacctagatgacaatgaaggagtctgtgatctgttcgacgtgcagattcttaattattag

SEQ ID NO: 31082 - DNA, 492 bp, synthetic construct
  source 1..492: mol_type = other DNA; note = Synthetic coding sequence
atgccatctatcaagctgcagtctagtgatggcgaaatcttcgaggtggacgtggaaatcgctaagcagtctgtcacaatcaagacaatgttggaggatttgggcatggacgatgaaggcgacgacgaccccgtgcctctaccaaatgttaatgccgctattcttaagaaggtaattcaatggtgtacacatcataaagatgaccctcccccacccgaggacgacgagaacaaggaaaagagaacggatgatatacccgtttgggaccaggaatttctcaaagttgaccagggtaccctgttcgagcttattcttgccgcaaactatctggacattaaaggcctcctggacgtgacgtgtaagacagtggccaacatgattaaaggtaagacgccggaagaaatacgcaaaaccttcaatattaaaaacgacttcaccgaggaggaggaggctcaggtgcgcaaagaaaaccaatggtgcgaggaaaagtag

SEQ ID NO: 31083 - DNA, 915 bp, synthetic construct
  source 1..915: mol_type = other DNA; note = Synthetic coding sequence
atgagcaaaagacgcaggctgaaacagggagagcccattatgacaggaaagactcagacgtctaatgttacaaacaagaatgacccgaaatctatcaatagtagggtgtttatcggaaatctgaatacagccatcgttaaaaaagttgacatagaggcgatcttctctaaatatggaaagatcgtgggatgtagcgtccacaaaggctatgcctttgttcaatacatgtcggaacgccacgcgagagccgctgtcgccggtgagaatgctagagtgattgcagggcagccgttagatatcaatatggcaggcgagcccaagccatataggcctaaaccagggaataaaagacctttgagtgccctctaccgtctggagtccaaagagccgtttctaagcgtggggggatatgtctttgactatgactattatcgcgacgacttctataataggttatttgattaccatggtcgtgtcccacccccaccaagagcggtaatcccactgaagcggcctcgggtggcagttacaaccacgcgtcgcggaaaaggggttttctctatgaagggtggatcacgcagtactgcatctggatctacaggaagcaagctgaagagcgacgagctacaaactattaaaaaagagttgacgcagataaagaccaagatcgatagtctcttgggtcgcttggagaagatagagaagcagcagaaggcggaggccgaagcccaaaaaaaacagctagaggagagcttggtactgatacaggaggagtgcgtgtctgaaatagcagaccattctactgaggagcccgcagagggtggacctgacgcagatggagaggagatgactgacggaatcgaagaggattttgacgaagatggaggacatgaactgtttctgcaaatcaagtag

SEQ ID NO: 31084 - DNA, 405 bp, synthetic construct
  source 1..405: mol_type = other DNA; note = Synthetic coding sequence
atgccttcggcagaagctaaactcaagaaaaatcgatgtgctaactgtttcgattgccccggatgcatgcacactcttagcaccagggccacatcaatttccacgcagctgcccgatgacccagcaaaaacaaccatgaagaaggcatattacttggcctgtggcttctgtcgctggacgagtagagatgtcggcatggccgataaaagtgtggcaagcggcggttggcaagaacctgagaacccccatacacaacgaatgaataaactgatcgaatactaccagcaactagcccagaaagagaaggtggagcgggatcgcaaaaaactggcacggagacgaaactatatgcctctggccttttctgacaagtatggattgggcacccgtctgcaaaggccctag

SEQ ID NO: 31085 - DNA, 1230 bp, synthetic construct
  source 1..1230: mol_type = other DNA; note = Synthetic coding sequence
atgtggagagtgatcgaacccccatgtcccggagccccaagcaccgaaaacggtaaaagcgtccattggaaacttggggctgataaggaagtctgggtctgggtgatgggagaacatcatctggacaagccctatgacgtcctctgtaatgagattatagccgagcgcgcacgattgaaagctgaacaggaagcggaggagcctaggaagacccactccgaagagtttacaaatagcctgaaaactaagtcacagtatcacgatctccaggccccagacaaccagcagacaaaggatatttggaaaaaagtcgccgaaaaagaggagttggaacaggggagccgcccagcgccaacactcgaggaggagaagattcgaagtctttctagcagtagtagaaacattcagcagatgctggcagatagcattaaccgcatgaaggcgtatgcctttcatcagaaaaaggaatctatgaagaaaaagcaggatgaagagattaaccagatagaagaggaaagaactaaacagatatgtaaaagttggaaggaagactctgaatggcaggcaagcctacgtaaaagcaaggccgcagatgagaagcggaggtccttggccaagcaggccagagaggattacaagcgtctgagccttggagctcagaaaggaaggggtggcgagagattgcagtcacctctgcgagtgcctcagaagccagagagaccccctctgcctccaaagccacaatttctgaatagtggggcataccctcagaagcctttgcgcaatcagggggtggtccgcacacttagcagcagtgcccaggaggacatcatcaggtggtttaaggaagaacagctgcctcttcgcgcagggtatcagaaaacttctgatacaatagccccatggttccacggaatactgacgcttaagaaggcaaatgagctgctgctgagcacagggatgcctggctcttttctcatcagggtttcagagcgtatcaagggatacgcccttagctatctgtcagaggatggatgtaaacatttcttgatcgacgcttcagccgacgcatattccttccttggggtagaccagctgcagcacgcaactttggccgatcttgtggagtaccacaaagaagagccgatcacatcactggggaaggaattgctgctatatccttgcgggcagcaggaccagctaccagactatcttgaactgttcgagtag

SEQ ID NO: 31086 - DNA, 390 bp, synthetic construct
  source 1..390: mol_type = other DNA; note = Synthetic coding sequence
atgtctgataagtctgacctcaaagcggagctcgaacggaagaagcagagacttgctcagattcgggaagaaaaaaagcggaaagaagaggaaaggaagaaaaaggaggctgacatgcagcagaaaaaagaaccggtgcaggatgattcggacctcgatcgcaaacgcagggagaccgaggcccttctgcagagcatcgggatttcgccagagccacctcttgtccctacacccatgtcaccctcttctaaaagcgtcagcaccccaagcgaggcgggatcacaggattctggtgatctcggccctttgacacgtacgctacagtgggacaccgacccatcagtcctgcaattgcagtctgactcagaacttggatatatgagtgcctag

SEQ ID NO: 31087 - DNA, 780 bp, synthetic construct
  source 1..780: mol_type = other DNA; note = Synthetic coding sequence
atggtgggacgcgaaaaagagttgtccattcactttgtgccaggctcctgtcggctggtggaggaagaggtgaacattccaaacaggcgtgttctagtgactggagctacagggctgctgggcagagctgtgcacaaagaatttcagcagaataattggcatgccgtggggtgcggctttcggagagcccgaccgaagtttgagcaggtcaatttattggactccaacgccgttcatcacattatccacgattttcagccccatgtgattgtccactgcgcagcggaacggaggccggacgtggtagagaatcaaccagacgccgcatcgcagctgaacgtggacgcctcagggaatctggctaaagaggccgctgctgtcggagcctttctcatctatatctcttcagactatgtcttcgatgggaccaaccccccatatagggaggaggatatacctgcacctctgaatctctacggaaagacaaagctggacggtgaaaaggccgtcctggaaaataaccttggtgctgccgttctgcgtatcccgatcctttatggagaagttgaaaaactcgaagagagtgctgtgacggtaatgttcgataaggtgcagttcagtaataagtccgcgaatatggatcactggcaacagaggtttcccacccatgttaaggacgtagccaccgtttgtcggcagcttgccgaaaagagaatgctggtgaggaggatccctgaatcctgcttaagtgaaggacccctctgcctcttccacgcctag

SEQ ID NO: 31088 - DNA, 549 bp, synthetic construct
  source 1..549: mol_type = other DNA; note = Synthetic coding sequence
tcttacgattccaccttttcctacgttacacacgaagacatctgtaattgcttcaatggcgacacactcctggcgatacaggccccttccggaacccaactggaagtgccaatccccgagatgggtcagaacgggcagaaaaagtatcaaatcaatctaaagtcgcactccggtcctatccacgtcttactgatcaataaagaatcaagctcaagtaaacccgtggtgttccccgtgccacccccagacgatctgacccagccttcgagccagagcctgacccctgtgactccacagaagtcaagcatggcaacacagaacctgcctgagcagcacgtttctgaaaggtcccaagcgctgcagcaaacctccgctaccgatattagcagtgcaggaagcatctcgggggatattatagatgaattgatgagttccgatgtgttccccctgctgagacttagccctacgcccgctgacgactataacttcaatctggatgacaatgagggcgtctgcgatttgttcgacgtgcagattctgaactactag

SEQ ID NO: 31089 - DNA, 162 bp, synthetic construct
  source 1..162: mol_type = other DNA; note = Synthetic coding sequence
atggactctgaactgatgcactcaatcgtgggaagctaccacaaaccccctgagagagtctttgtaccgtccttcactcaaaatgagccatcacagaattgccaccccgctaacctagaagtgacatcgccaaaaatcctccacagtccaaatagccagtag

SEQ ID NO: 31090 - DNA, 3018 bp, synthetic construct
  source 1..3018: mol_type = other DNA; note = Synthetic coding sequence
atggcgggtgctctaagaaggggcagagcactaggttctcgccctagcggccctactgtcagcagtaggcgatcccctcagtgtccagtcgcacaagaagggttaggggcaaggtctagacccagagttgcgccacgctcattggctcggtgtggtccaagctctcgactcatgggctggaagccgtccgaggctcgtggccaaagtcaaagctttcaggctagcgggttgcaaccccgatcactcaaggccgcacgaagggctaccgggagacctgaccgtagtcgcgctgcgaggcccaccatggatccatcagcccacagatctagggctgccccacccaatatggatcccgatcctcaagccggtgtccaggtaggaatgcgagtggtgaggggtgttgactggaaatgggggcaacaagatgggggagaaggaggagttgggacagtggttgagctagggaggcatggcagtccatccactcccgacaggactgttgtagtgcagtgggatcagggcactcgtacaaattatcgcgctggataccagggagcacatgacctgttactttacgataacgcacagatcggagtgagacaccccaacattatctgcgactgttgtaagaaacatggtctgcgcggtatgcgctggaaatgcagagtatgtctcgactacgatttgtgcacccagtgttacatgcataacaaacatgagctagcccatgcttttgacagatacgagacggcacattcccgacccgtgacactgagccccaggcaaggtttgccacgtataccactccgcggtattttccagggtgcaaaggtggtgcgaggccctgattgggaatggggctctcaggatggtaagcctgctgagctccagcggagagtgagcgctgacagccagccatttcagcacggggacaaggtcaagtgcctgcttgacactgacgtgctcagagaaatgcaggaagggcacgggggatggaaccctagaatggcagaattcataggccagactgggaccgtacacaggataacagaccgcggagatgtacgcgtgcaatttaaccatgagacacggtggacgtttcaccccggagccctcactaagcaccactcgttctgggtgggtgacgtggtccgcgttattggagatctggataccgtcaaacgattgcaggcgggacatggagaatggactgacgacatggcacccgcattgggaagagtggggaaagtggtaaaggtctttggggatggaaacttaagagtggccgttgcgggacagcgctggacattctccccttcctgcctggtagcttacaggcctgaggaggatgctaacctcgatgtcgcggaaagagcgagggagaataaatctagcctctcagtggccctggataagcttcgggctcagaaatccgaccctgaacatcccggacgactcgtggtggaagtcgccctcggaaatgccgcaagagcgctcgatctgctgaggaggagaccagagcaggtggacaccaaaaaccagggcaggaccgcactacaggtggccgcatatctcgggcaggttgagctgatccgattactattgcaggcccgtgctggtgttgatctcccagacgatgaagggaatactgcacttcattacgccgcattgggtaaccaaccagaggccactcgagtcctgctctcagctgggtgccgggcagacgccataaactccacacagtcaacagccttgcacgtggcagtgcaaagaggattcctcgaggttgtccgcgcattgtgtgaacgcggatgcgatgtgaacctgcccgatgcccatagcgatactccgctgcacagcgctatctcagccggaacaggggcttccggtatcgtggaagtcctgacagaagtccccaatattgacgtgacagccacaaattcacagggcttcaccctgctgcatcatgcatccctcaagggtcatgccctggcagtgcgcaagattttggctcgcgctcggcagctggtggacgctaaaaaggaagacggtttcaccgccctccacctggctgccctgaataaccatcgagaggtggcgcagatactgatccgggaaggccgatgtgatgttaacgtgcgcaataggaagctgcagtcccctctccacctggcagtgcagcaggctcacgtcggcctggtaccattgctggtagacgcaggttgttctgtcaatgcagaggatgaggaaggcgatacggcgctgcacgtggcattgcaacgacaccagctgctgccgttagtcgctgacggggctggcggagaccccggacccctgcagctgctgtcccgcctgcaagcctcagggctccccggtagcgcagagcttacggttggcgcagctgtggcatgtttcctcgctctagagggggctgatgtgagttatacgaatcataggggacggagtcccctggatcttgcagccgagggacgcgtactcaaggctctgcagggatgtgcgcagcggtttagagaacgccaagctggaggtggagccgctcccggaccccgacagaccttggggactcccaatactgtgaccaatctgcatgtaggagcggctcccggacctgaggccgcagagtgtttggtttgttccgagctggcgttacttgtcctgttctctccttgtcagcacagaaccgtctgcgaagagtgtgcccgaagaatgaagaaatgtatcaggtgccaagtcgtcgtgtccaagaagctccggccagatggctccgaagtcgccagtgctgcccctgctccaggaccacctcgccagctggtcgaggaactgcagtcaagatataggcagatggaggaacgcatcacatgtcccatatgcatcgattcacacatccgcctggttttccagtgcggccacggggcatgcgctccatgtgggtcagccttgagtgcatgccctatctgcaggcagcctatccgagacaggattcagatatttgtgtag

SEQ ID NO: 31091 - DNA, 294 bp, synthetic construct
  source 1..294: mol_type = other DNA; note = Synthetic coding sequence
atggctagttccgccgaactggacttcaacctccaggctttgcttgaacaattatcacaggatgaactgtcaaagtttaagtcattgatacgaaccatctcacttgggaaagaactgcagactgtcccccaaaccgaggtcgataaggcaaatgggaagcagctagtggaaatattcacgagtcatagttgttcctattgggcgggaatggctgctatccaggtgtttgaaaagatgaatcagacccaccttagcggtagggctgacgagcactgtgtcatgccccctccatag

SEQ ID NO: 31092 - DNA, 693 bp, synthetic construct
  source 1..693: mol_type = other DNA; note = Synthetic coding sequence
atggatagcgaactgatgcatagtatcgtaggaagctatcacaagccgccagagagagtattcgtgccatcctttacgcagaacgaacccagtcagaattgccacccagcaaacctggaggtgacaagcccaaaaattctccactctcccaacagtcaggccctaattcttgctctgaaaaccctccaggaaaagatccatcgccttgaactcgagaggacccaagccgaagacaacttaaacattttaagtagggaggctgcccagtataagaaagcacttgagaatgaaacgaacgaacggaacttggcccaccaagagttgatcaaacagaagaaggacatctccattcagctttccagcgctcaatcaaggtgcacactgctggagaaacagctcgaatataccaaacgcatggtgttaaacgttgaacgtgaaaaaaacatgattctggagcagcaggcacaactgcagagggaaaaagagcaggatcaaatgaagctgtacgcaaagctcgaaaaactggacgtgctcgagaaggaatgttttagacttaccaccacccagaaaactgctgaagacaagattaagcatctagaagagaagttgaaggaggaggagcatcagcgcaaactcttccaggataaggcctccgagctgcaaacgggtctcgaaatcagcaagataatctag

SEQ ID NO: 31093 - DNA, 624 bp, synthetic construct
  source 1..624: mol_type = other DNA; note = Synthetic coding sequence
atggatagaggggagcaggggctattgaggacggatcccgtgccagaggaaggcgaggatgtggcagcaacaatatcagctacagagacccttagcgaagaagaacaagaggagttgagacgtgaactggcaaaggtcgaagaagagattcaaaccctgagccaagtcttagccgctaaagagaaacacctcgccgaaattaaacgcaaacttgggattaactctctccaagaactgaagcagaatatagccaaaggctggcaggatgtcaccgctaccagtgcatataaaaagaccagcgaaacactcagtcaggccggacagaaggcctcagctgccttttcgtccgtgggatcggtgataactaaaaagttagaagatgtgaagttgcaggccttcagccatagtttctcgataagaagcatccagcactccatttcgatgccagccatgaggaattcacctaccttcaagagttttgaggagaaggtggaaaatctcaaatctaaggttggaggtaccaaacccgcaggcggagattttggcgaagtgctaaactcagctgcgaacgccagcgcaaccacgacagaacctctgccggaaaaaactcaagaatcgttgtag

SEQ ID NO: 31094 - DNA, 387 bp, synthetic construct
  source 1..387: mol_type = other DNA; note = Synthetic coding sequence
atgaagttcaacccttttgttacttccgacaggtcgaaaaaccggaaaaggcatttcaatgctcccagtcacgtccgcaggaagattatgtccagtcccttgagtaaagagctccgccagaagtacaacgttagaagcatgcccatccgcaaagatgatgaggtgcaagtggtgcggggtcactataaaggacagcaaataggcaaagtcgtgcaggtctaccgcaaaaaatatgtgatttacatcgagcgggtccagcgggaaaaggctaacggaaccaccgtgcatgtcgggattcatccttcaaaggtggtcataaccaggctcaagctggataaagatcgtaagaaaatactggagaggaaagctaagtcgagacaggtctag

SEQ ID NO: 31095 - DNA, 126 bp, synthetic construct
  source 1..126: mol_type = other DNA; note = Synthetic coding sequence
gggcttaccaagcaactcttggatgacaccatcggaatacatcccacttgtggggaagtgtttaccacactggagattacaaaatcaagcggccttgatattacacaaaaagggtgttgaggctag

SEQ ID NO: 31096 - DNA, 1365 bp, synthetic construct
  source 1..1365: mol_type = other DNA; note = Synthetic coding sequence
atgctgaagcaaattctctcagagatgtacatcgaccccgaccttttggcggaactctccgaggagcagaagcaaattcttttttttaaaatgagggaagagcagatcaggcgctggaaggaacgcgaggcagcgatggagcgcaaggagtccctacccgtcaagcctagacctaaaaaagagaatgggaaaagcgtgcactggaagctcggagcagataaagaggtgtgggtctgggtcatgggggagcaccacttggacaagccctacgacgtcctgtgcaacgagatcatcgctgagcgcgcaagactgaaagccgagcaagaagctgaagaaccgagaaagacccattctgaggagtttacaaactccctgaaaacaaaaagccagtaccacgacctccaagcaccggacaaccagcagactaaagacatatggaagaaagtcgcggagaaagaggagctggagcaaggctctaggccggcacctactctcgaggaagaaaaaattcggagcctgtcatcttccagtcgaaatattcagcagatgctggccgacagcataaaccggatgaaggcctacgcctttcatcaaaaaaaagagtcaatgaagaagaaacaggatgaagagattaaccagattgaggaggagcggaccaagcaaatctgcaagtcatggaaggaggactcggagtggcaggcatctttgagaaaatccaaagcagcggatgagaagagacgcagtttagctaagcaagctcgggaggattataagaggctgtccctgggtgcacaaaaaggaagaggtggtgaacgcctccaaagtccacttcgtgtgccacagaagcctgagaggcctcctctgcctccaaaaccacagtttctgaattccggcgcatatcctcagaagccactacgaaaccaaggtgttgtccggactttgtcctcatctgcccaggaggatattattcggtggttcaaagaggagcaactcccgctgcgagcaggataccagaaaacctccgacaccatcgcaccttggttccatggaatcttgaccttgaaaaaggcaaacgagctgctgctgtccactggtatgccgggaagctttctgataagggtgtcagaacgaataaagggatacgcactgagttacctgagtgaggatggctgcaagcattttctgatcgacgcatctgccgacgcttacagcttcctgggcgtggaccagctgcagcacgccaccttagcagatctggtcgaatatcacaaagaagagccaatcacctctctgggcaaggaacttctgctgtacccatgtggtcaacaggatcagctgccagattatctggagctgtttgagtag

SEQ ID NO: 31097 - DNA, 438 bp, synthetic construct
  source 1..438: mol_type = other DNA; note = Synthetic coding sequence
atgaagtttaatcctttcgtgactagcgatcgaagtaaaaacagaaagaggcattttaatgcacccagtcacgtaagaaggaagatcatgtcctctcctctgtctaaagaactgcggcagaaatataacgtacgcagcatgcccattaggaaagacgatgaggttcaggtggtgagggggcactacaaagggcaacaaatcggaaaagtcgtccaggtctaccgcaagaagtatgtcatttatatcgagcgagttcagagagagaaggccaacgggaccaccgtgcatgtcggtatccaccccagcaaagtcgtgatcacacggctgaaactggacaaagataggaaaaaaattctggagaggaaagcaaagagcagacaagtcggcaaggagaaaggaaagtataaggaggagctcattgagaaaatgcaggagtag

SEQ ID NO: 31098 - DNA, 621 bp, synthetic construct
  source 1..621: mol_type = other DNA; note = Synthetic coding sequence
atggactccgaactgatgcacagcattgtagggagctaccataagccaccggaaagagtgttcgtccccagcttcacccagaacgagcccagccagaactgccaccccgcaaatctggaggtcacatcaccaaagatcttacatagcccgaattcccaggcgctgattttagcgcttaagactctgcaggaaaagattcatcggcttgagttggagagaactcaggccgaagataatctcaatattttgagtcgagaggcagcccagtacaagaaggcgttggaaaatgaaaccaatgagcggaatctggcacaccaagagctgatcaaacagaaaaaggacatcagtattcagctgtcctccgcgcagagcaggtgcacgctgctggagaagcagctggagtataccaagaggatggtccttaatgttgagagagagaaaaacatgatactcgagcaacaggctcagcttcaacgggaaaaagaacaggatcagatgaaactctacgctaaattggagaagctggatgtactcgagaaagagtgtttccggctgaccactacgcagaagaccgcagaggacaagatcaaacatctggaggagaaactcaaagaggaatag

SEQ ID NO: 31099 - DNA, 1050 bp, synthetic construct
  source 1..1050: mol_type = other DNA; note = Synthetic coding sequence
atggaagacccccagtcaaaagagccggctggagaagcggtggccctggcactcctcgaatctcctcgcccagagggcggagaagagcccccaaggccctcgcctgaggaaactcagcagtgtaaattcgatgggcaggagactaagggctctaagtttattacgtcctccgcaagcgacttcagtgaccctgtctataaagaaatcgccattactaacgggtgtatcaaccgcatgtccaaggaggagctgagggctaagctcagtgagttcaaactagaaacccgcggtgtaaaagacgtgcttaagaagaggctcaaaaattattataagaaacaaaaactcatgctcaaagaatctaacttcgcagacagctattatgattacatctgtatcatcgattttgaggctacgtgcgaggagggcaaccctcctgagttcgtgcatgaaataattgagtttcccgtcgttcttctgaatactcatacactggaaattgaagacacgttccagcagtacgtgcgcccagagattaatacccaactgagcgacttttgcatctctctgactggcatcacccaggaccaagttgacagggctgacacattcccacaggtgctcaaaaaagtgatcgattggatgaagctgaaggagctgggcaccaaatataagtactcccttctgactgacggctcttgggatatgagtaaatttctgaatatacagtgccagttaagtcgcctgaaatatccacctttcgctaagaagtggatcaacattagaaagagttacgggaatttctacaaggtgcctcgttcacaaaccaaactgactatcatgctcgaaaagctcggaatggattatgacgggagaccccactgcggacttgacgactcgaaaaacatcgccagaatagccgtaaggatgctccaggacggttgcgagctgcgcataaacgagaaaatgcacgccggtcagctcatgtccgtctcttcttcgctgccaatcgagggcacaccaccccctcagatgccccacttccgtaagtag

SEQ ID NO: 31100 - DNA, 429 bp, synthetic construct
  source 1..429: mol_type = other DNA; note = Synthetic coding sequence
atgcccagtatcaaactgcaatcttcagacggcgagatcttcgaagtcgatgtagagatcgcaaagcagtctgtcactattaaaacgatgctcgaagacctggggatggatgacgaaggcgacgacgaccccgtgccactgccaaatgtcaacgcagccattttgaagaaggtcattcagtggtgtacccaccacaaggacgatcctccacctcccgaagatgacgaaaacaaagagaagcggacagatgacataccagtgtgggaccaggaattcttgaaggtggaccaggggactttgtttgagctgattcttgcggcaaactacctcgatattaaggggctactcgacgtgacatgtaaaactgtggctaatatgatcaaagggaagactccagaagagatccgaaagacttttaacatcaaatag

SEQ ID NO: 31101 - DNA, 375 bp, synthetic construct
  source 1..375: mol_type = other DNA; note = Synthetic coding sequence
atgtccgctaccgtggtagatgccgtgaacgctgctcccctctctggatccaaagagatgagtcttgaagagcctaaaaaaatgacccgagaagactggcgcaagaagaaggaattagaggaacagagaaagctgggcaacgccccagctgaggtggatgaagagggtaaggacattaaccctcacataccccagtatattagtagtgtgccgtggtatatcgacccatcaaagaggccaactctcaagcatcaaaggcctcagccagagaagcagaagcagttctcctcaagcggggagtggtataaacgtggggtgaaagagaactcgatcatcacaaagtatagaaaaggggcatgcgagaactgtggctag

SEQ ID NO: 31102 - DNA, 750 bp, synthetic construct
  source 1..750: mol_type = other DNA; note = Synthetic coding sequence
atggtggatcggttggccaacagcgaagccaatactcgcagaatatccatagtggagaattgcttcggggctgcaggacagcccctgaccatcccagggagggtccttatcggcgaaggagtactgacgaaattatgtcggaaaaaaccaaaggcccgacagtttttcttatttaacgacatcctggtttacggcaatattgtgatacagaagaagaagtacaacaagcagcatataattcctttggagaatgtcaccatcgacagtattaaggacgagggagatctgagaaacggttggctgataaagacccccactaaatcatttgcagtatatgcagcgaccgcaaccgagaagtctgagtggatgaatcacattaacaagtgcgtgactgacctgcttagcaagtccggcaaaacgccctcaaatgaacacgccgctgtgtgggttcctgatagcgaggcgaccgtctgcatgcgctgccagaaggccaagttcacacccgtcaatcggaggcatcactgccggaagtgtgggtttgttgtctgcggtccctgtagtgagaagcgcttccttcttccctctcagtctagtaagccggtccggatctgcgatttctgttacgacctgctgagcgcgggtgatatggcgacatgccaaccggctaggtcagattcctattcccagagccttaagtctcctctgaatgatatgtcagacgacgacgacgacgacgacagttctgattag

SEQ ID NO: 31103 - DNA, 120 bp, synthetic construct
  source 1..120: mol_type = other DNA; note = Synthetic coding sequence
atgaaattcaatccatttgttaccagtgaccgctcaaaaaatcggaagcgtcactttaacgcaccaagtcacgtgcgaagaaagataatgagtagcccccttagcaaggagctccgctag

SEQ ID NO: 31104 - DNA, 1401 bp, synthetic construct
  source 1..1401: mol_type = other DNA; note = Synthetic coding sequence
atggggtggatcactgaggatcttatccgcagaaacgctgagcataatgattgtgtcatcttttccctggaggaattgagcctgcaccagcaggaaatagagcggctggaacatatagacaagtggtgtagggatctgaagatcctgtatctgcagaataacctgatcggcaaaatagagaacgtttcaaaactcaagaagcttgagtatctcaatcttgccctgaataacatcgaaaagatcgaaaatctcgagggttgcgaggagcttgccaagctggacctgacggtcaatttcataggtgagctctcgtccataaagaacctgcagcataacatccatctgaaggagctcttccttatggggaacccctgtgccagctttgaccactacagggagtttgttgtcgccaccctgccccagttgaagtggttggatggaaaagagatcgaaccgagcgagaggataaaggccctgcaggactacagcgttatagaacctcagattagagaacaagaaaaggaccattgcctcaaacgcgcaaagcttaaggaagaagcccagagaaagcaccaggaagaagataagaatgaggataagcgatctaatgctggatttgacggacgctggtacacagatatcaatgccactctgagcagcttagagtccaaggatcacctccaggcaccagacaccgaggagcacaacactaagaagttggacaactccgaggatgatttggaattttggaataaaccttgcttgttcactccagagtcaagactggaaactctacggcacatggagaagcagagaaaaaagcaggaaaaacttagcgaaaagaaaaaaaaagtcaagcccccacggacactcatcaccgaagacggcaaggctctgaacgtaaacgagcctaaaattgactttagcctgaaggacaatgagaagcaaattatcttagacctcgccgtgtatcggtacatggatactagcctcatcgacgtggacgtgcagccaacctacgtgcgagtgatgatcaaaggcaaacccttccagctggtgctgcccgctgaggtgaaaccagactcatcctctgccaaacgtagccagaccaccggccacctggtcatctgtatgcccaaggtcggagaagtgataaccggcggacagagagcctttaagtccatgaagaccacatctgaccgtagtcgggaacagactaatacacgcagtaaacatatggaaaaacttgaggtggaccctagcaaacatagtttccccgacgtaactaacatcgtccaggagaaaaagcacacccccaggaggcggccagagccaaagatcatcccctctgaggaggaccccacatttgaggataatcctgaagttcccccactgatatag

SEQ ID NO: 31105 - DNA, 528 bp, synthetic construct
  source 1..528: mol_type = other DNA; note = Synthetic coding sequence
atggcatcgaatcacaagagcagtgctgctcggccagtgtcaagagggggtgtcggccttactggacgtccgccatctggcattagacccttgtcagggaatattcgcgttgccacagcaatgccaccgggaacagcgaggccgggaagccgaggatgtccaatcggcacagggggagtactcagtagtcagatcaaggtggcccaccgccctgtcacccagcagggcctcacaggaatgaagaccggaaccaagggacctcagcgtcagatactggacaagtcatattatctggggctgcttcgctctaagataagtgagctcactacggaggtgaataagctccagaaaggaatcgaaatgtacaatcaggagaattctgtgtatctgtcatatgaaaagcgcgctgagacactggcagtcgaaattaaagagttgcagggccagctcgccgactataacatgctagtggacaagctcaacaccaacaccgaaatggaggaagttatgaacgactataacatgtag

SEQ ID NO: 31106 - DNA, 438 bp, synthetic construct
  source 1..438: mol_type = other DNA; note = Synthetic coding sequence
atgaagttcaatccctttgtgacctccgaccgctcgaagaataggaagcgccacttcaacgcgccaagtcacgtcagaagaaagataatgtcttcaccgctgtcaaaggagctccggcaaaaatacaacgtgcggtccatgcctatcaggaaggatgatgaggttcaggtagtgcgcggacattacaagggtcaacagataggtaaagttgtgcaggtctatcggaaaaaatatgtgatctatatcgagagagtacagcgtgaaaaggctaacggcaccactgtgcacgttggcattcatccgagcaaggtggtcattactcggttaaaactggataaggacagaaaaaaaattctggaacggaaagctaagtcccgtcaggtgggaaaggaaaaaggtaagtataaagaagagcttattgagaagatgcaggagtag

SEQ ID NO: 31107 - DNA, 2136 bp, synthetic construct
  source 1..2136: mol_type = other DNA; note = Synthetic coding sequence
atgtcttctgtgcaatctcagcaggagcagctgagccagtccgacccctctccctcacccaattcttgtagctccttcgaattgattgacatggacgccggaagcctatatgaaccagtatccccccactggttctactgtaagattatcgatagcaaagagacatggataccatttaattcagaggatagccagcaactcgaagaggcctatagctctggtaaggggtgtaacgggagggtggttcccacagatggaggcagatatgatgtccacctgggagaacgcatgcggtacgccgtttattgggacgagttagcttcagaggtgaggcgatgtacatggttctataaaggagataaagacaacaagtatgttccttattccgaaagctttagccaggtcctggaggaaacgtatatgctggccgtgaccctggacgaatggaaaaagaagctggaatcgcccaatagagagataattatactccacaatcccaagttaatggtccattaccagcctgtggcgggtagcgatgactggggatccacacctaccgagcaggggcgtccccgtacagttaaaagaggagtcgagaatatctcagtggacattcactgcggcgagccattgcagatcgaccacctggttttcgtggtgcacgggatcggccctgcctgcgacctgcgcttccggtccattgtacaatgcgtgaatgatttccgctctgtgtccttgaacttgctccaaacccactttaaaaaggcccaggaaaatcagcagatcggacgggtcgaatttctgccggtgaattggcactccccattgcacagcacaggagttgacgttgacctgcagaggatcactcttccatccattaacaggttgaggcacttcacaaacgatacaatcctggatgtttttttctacaactctcccacatattgccagacaatagtggacacagtagcgagcgagatgaacagaatttacacactgtttctgcagaggaatcccgacttcaaaggaggggtctctatcgcaggacacagcctgggatccctgatcctgttcgacattctcacaaaccagaaagacagcctgggggacattgattccgagaaagattcacttaatattgtgatggaccagggggacacccctacgctcgaggaggacctcaagaaacttcaattgagcgaatttttcgacatcttcgagaaggaaaaggtagacaaggaggcactcgccctctgcacagatagagacctgcaggagattgggatccctcttggcccaaggaaaaagattctgaattacttctctactcgaaaaaattcgatgggaataaaacgccctgcaccacagcctgcatccggagcaaacattccaaaagagagcgaattctgctcaagttcaaataccaggaatggcgactatctggacgtcgggatcggccaggtttctgtgaaatacccacggctcatatataagcctgagatttttttcgcctttgggtctccaatcggtatgtttcttactgtgaggggactaaagcgaatcgaccctaattacaggtttcccacttgtaaggggttttttaatatctatcacccattcgatcccgtagcttatagaatcgaacccatggttgtcccaggggtggaattcgaacctatgcttatccctcaccacaaaggcagaaaaaggatgcatctggaattgagagaagggttgaccagaatgtccatggacctaaaaaataacctcttgggctctctaagaatggcctggaagtctttcacccgcgcaccctacccagctctccaagcgagcgaaacccctgaggagacagaagcggaaccggagtcaacatccgagaaaccatcagatgttaacactgaagagacgtcagtagctgtgaaggaggaagtattgcctattaatgtgggaatgttaaatgggggacagaggatcgattacgttctgcaggagaagcctatcgagagttttaacgagtacttgtttgcactgcagtctcacctgtgctactgggagagcgaggacacagtgttactggtactgaaggagatatatcagacccagggaatctttctcgaccagccgctgcagtag

SEQ ID NO: 31108 - DNA, 471 bp, synthetic construct
  source 1..471: mol_type = other DNA; note = Synthetic coding sequence
atggcgtcggtgctttcgagacgtctcgggaaacgatccttactgggcgcacgggtcctcggtccttctgccagcgagggtccatcggccgctcccccttctgagccactcctcgagggcgcagcaccacagccattcactacaagcgacgacactccttgccaggaacagcccaaggaggtcctcaaagccccaagtacttcaggacttcagcaggttgccttccagcctggccagaaggtgtacgtctggtatggcggtcaggaatgcacagggttggtagaacagcactcatggatggaagggcaggttacagtctggctgctggagcaaaagctccaggtctgctgcagagtcgaggaagtgtggcttgcggagctccaagggccttgccctcaggcaccccctctagagccaggcgctcaggccctggcttacaggccagtatcccgtaatattgacgtgccgtag

SEQ ID NO: 31109 - DNA, 309 bp, synthetic construct
  source 1..309: mol_type = other DNA; note = Synthetic coding sequence
atgccgtctattaaactccagagctctgatggcgagatttttgaggtcgatgtcgagattgccaagcagagcgttactattaagaccatgctcgaagacctgggaatggacgacgagggggatgacgaccctgtccctttgcccaacgtgaacgctgcaatattgaagaaggtgattcagtggtgcacacatcataaagacgaccccccaccacccgaggatgacgagaacaaggagaagaggaccgacgatataccggtgtgggaccaagagtttctgaaggtggatcagggcacattattcgagtag

SEQ ID NO: 31110 - DNA, 465 bp, synthetic construct
  source 1..465: mol_type = other DNA; note = Synthetic coding sequence
atggcggatgatctagacttcgagaccggagacgctggagccagcgctacctttcccatgcagtgtagtgccctgaggaagaatgggtttgtcgtattaaaggggtggccctgtaaaattgtggaaatgtcggcctcgaagaccggtaagcatggacacgcaaaggttcacctcgtgggcatcgatattttcaccgggaagaaatatgaagatatttgtccgtcgacacataatatggatgtcccaaacataaaaaggaacgatttccagctgattggaatccaggatggctatctgagccttttgcaggacagcggggaagtgcctgaagatctacggttgccagaaggagacctgggcaaggaaatcgaacagaaatacgattgtggtgaggaaatcctgatcaccgttctctccgcaatgactgaggaggcagctgtggctataaaggccatggctaagtag

SEQ ID NO: 31111 - DNA, 306 bp, synthetic construct
  source 1..306: mol_type = other DNA; note = Synthetic coding sequence
atgtccgccactgttgtagatgccgtgaacgcagctccactgagcggcagcaaggagatgtccctggaggaaccgaagaaaatgacgcgtgaagactggcgcaagaagaaagaacttgaagagcaacggaaactgggtaacgcacccgcagaagtagacgaagagggcaaagatataaacccccatatacctcagtatatcagcagcgtcccctggtacatcgacccctcaaagcgtcccaccctgaagcatcaacggccacagccagaaaaacaaaaacaattctcttcctctggggagtggtag

SEQ ID NO: 31112 - DNA, 3201 bp, synthetic construct
  source 1..3201: mol_type = other DNA; note = Synthetic coding sequence
atggcgggtgcactcaggcggggaagagcgctgggtagtcggccttctggcccaaccgtatctagcagacggagcccccaatgccctgtggctcaagagggattaggagcaaggtcacgaccgagagtagcacccagatccttggctaggtgcgggccaagcagtcggttgatgggatggaagccctccgaagcacgcggtcagagccaatccttccaagcatccgggctgcagcctcgatcgttgaaggcagccaggcgggcaaccggtagaccagaccggagccgagccgctcgccctacaatggatccaagcgcccaccgttcaagagcagcacctcccaatatggatcccgacccccaagcaggagtccaggtgggcatgcgcgttgtaagaggtgtcgactggaagtggggacagcaggatggaggggaggggggagtgggcacggtagttgaacttgggcgtcatggtagcccaagtacaccagatcgaacagttgtcgtgcagtgggatcaggggaccagaaccaactacagggcaggttaccagggagcccatgatctcctgctgtacgacaacgcgcaaattggagtccggcatcccaatatcatctgtgactgctgtaagaagcacggactgagaggaatgaggtggaagtgtagagtgtgcctcgactatgatctctgcacgcagtgctacatgcataataagcatgaactggctcatgctttcgataggtacgagacagcacattctcgccctgtgactttgagcccgagacagggcctgcccagaatacctctccggggaatttttcagggcgcaaaagtggttaggggcccagactgggaatggggtagccaagatggcggagaggggaagcccggacgggtggtagacattcggggatgggacgtggaaaccggccgaagtgtggcgtctgtgacatgggcagacgggacaacaaacgtctaccgggtgggtcataaagggaaagtggaccttaaatgcgtaggtgaagccgcagggggattctactacaaggatcatctgcctagactcggaaaacccgcagagctgcagagacgagtgagtgcagactcccagccctttcagcatggcgataaggtaaagtgtctcctcgataccgatgtcctgcgagaaatgcaagagggccacggcggatggaacccacgaatggccgagacagggacagtacacaggattaccgatcggggagacgtccgcgtgcagtttaatcatgaaacaagatggacgtttcatcccggtgcgcttacaaagcatcactctttctgggtcggtgatgtcgtgagagtcatcggtgatctagatacagtaaaacggctccaggccggtcacggagagtggactgacgatatggcgcctgccctgggcagggtgggtaaagttgtgaaggtgtttggagacggcaacttacgggtggcagtcgctgggcagcgctggactttcagccccagttgtctggtggcctaccgccctgaagaggatgcgaaccttgacgtggcagaacgtgcacgagaaaataagagttcgctgagcgttgcgcttgacaagttgcgggctcagaagtccgaccctgaacatccgggaagactcgtagtggaagttgccctgggaaatgctgcaagggctttggatctgctgaggcgcaggccagagcaggttgacacaaagaatcagggccgtaccgccctgcaggtcgccgcatacctgggccaggtcgaactaatcagactgctgcttcaggcccgtgctggggttgatctcccagatgacgaggggaatacagctctgcattacgccgctcttggcaaccaacccgaggccacccgcgtgctcctgagcgcaggctgccgagcagacgctattaactcaacacagtctactgcattacacgttgcggtgcagaggggtttcttggaggtggtaagggccctgtgcgaacgcggatgtgacgtgaatcttcccgacgcccactctgataccccactgcactctgcaatcagcgccggaacaggggcaagtggaatcgtggaagtgctgactgaggtaccaaacatagacgttaccgcaacaaatagccagggattcacgttactccatcatgcatcactcaaggggcatgcccttgccgtgagaaagatcctcgccagggctaggcagttggtggatgccaagaaagaggatgggttcaccgccttgcacctggcggctttaaacaaccaccgagaggtggctcagattctgataagagagggcaggtgtgatgtgaatgttagaaaccggaagctgcagtctcctctccacctcgctgttcagcaggcgcacgtcggcttggttcctctgctggtggacgcgggatgctcggtaaatgctgaggacgaggagggtgacaccgcattacacgtggcactgcaacgccatcagttactgcctcttgtcgccgacggggctggaggtgatccagggccactccagcttctctcacgcttgcaggcctcaggtctcccaggatctgccgagcttacagttggggctgctgtggcatgcttcctcgccctggaaggagcagacgtttcatacacaaaccatcgagggcgatcccccctggatctcgccgctgagggcagagtactaaaggccctgcaggggtgcgctcagaggttccgggaaagacaggcaggcggtggtgccgcacctggccctagacagaccctcggaacacccaacactgtcaccaacctgcacgttggggcagctcccggtccggaggccgcagagtgtctggtgtgttccgaactagcactcttggttctcttctcaccctgccagcacaggaccgtgtgtgaagagtgcgctcggagaatgaaaaaatgtatacggtgtcaggtcgtggtctctaagaagctgcgccctgacggctcggaggttgcctccgccgcacccgctcctggccctcctaggcagctggtggaggagttgcagtcaaggtaccgtcagatggaggagagaatcacttgcccgatctgcatcgacagtcatattaggctggtattccagtgtggtcacggcgcttgtgcgccttgcgggtctgccctatccgcttgtcccatctgtagacagccaattcgggaccggattcagatcttcgtgtag

SEQ ID NO: 31113 - DNA, 348 bp, synthetic construct
  source 1..348: mol_type = other DNA; note = Synthetic coding sequence
atgatgctgggaaccgaaggcggagagggcttcgtcgtcaaggtgaggggcctgccgtggagctgcagcgcggacgaagttcagcgcttcttctctgactgcaagatccagaatggagcacagggcatacggtttatctatacaagggaaggacggcctagcggggaggctttcgtcgagctggagagcgaggacgaggtgaagctcgcactgaagaaggacagggaaactatgggacaccgatacgtggaagtgttcaagtccaacaatgtggaaatggattgggtcctgaaacatacggggccaaactcccccgatactgccaacgacggcttcgtcaggctgtag

SEQ ID NO: 31114 - DNA, 375 bp, synthetic construct
  source 1..375: mol_type = other DNA; note = Synthetic coding sequence
atggcttctgtgctcagccggagattggggaagcggtcgctgttgggtgcacgtgtgctcggcccttccgccagtgaaggcccatccgccgctccccctagtgagccattactcgaaggcgctgcgcctcaaccttttactacgagcgatgataccccctgccaggaacagcccaaagaagtgctgaaagcaccgtccacgagcggcctgcagcaggttgccttccagcctggccagaaagtctacgtgtggtatgggggtcaagaatgtactggcctagttgagcaacatagctggatggaaggtcaagtcacagtctggttgctggagcaaaaactgcaagtttgctgcagagtggaggaggtgtggctctag

SEQ ID NO: 31115 - DNA, 438 bp, synthetic construct
  source 1..438: mol_type = other DNA; note = Synthetic coding sequence
atgaaattcaacccatttgtgacctctgatcgttccaaaaacaggaaaagacacttcaatgccccaagccatgtgcggaggaagatcatgtcctcccccctctctaaagagctgagacagaagtacaatgtgaggagcatgccgattcggaaggacgacgaggtacaggtggtgcgaggccactacaaagggcagcagattggaaaggtggttcaggtttaccggaaaaaatatgtgatttacattgagagagtccaaagagagaaagcaaacggaactacagtccatgttggaatccacccttccaaggtagtgattacccggctgaagctggataaggaccgcaaaaagatcctggagcgcaaggccaaatctagacaggtgggaaaggaaaaagggaagtacaaagaggaactcatcgaaaaaatgcaggagtag

SEQ ID NO: 31116 - DNA, 339 bp, synthetic construct
  source 1..339: mol_type = other DNA; note = Synthetic coding sequence
atggattcagaactcatgcatagtattgtgggtagctatcacaaaccacctgaaagggtgtttgtgcccagtttcacccagaatgaaccttctcagaactgccatcctgccaatctggaggtgacttcccccaagattttacattcccctaatagccaagccctgattctggcattgaagactctccaagagaagattcaccgtctcgaactggagcggacacaggccgaagacaaccttaatatcctctccagagaagccgcacaatacaaaaaggctctggaaaatgagacaaacgagagaaacctggcccatcaggagctgatcaagcagaaatag

SEQ ID NO: 31117 - DNA, 345 bp, synthetic construct
  source 1..345: mol_type = other DNA; note = Synthetic coding sequence
atgccatccgccgaggctaagctcaagaaaaatcgctgcgccaactgtttcgactgccccggatgcatgcacaccttgtctacccgggcaacctccatcagcacccagctgccagatgatcccgcaaagacaacaatgaagaaggcttactatttggcttgcgggttttgtcgctggacgagtagagacgtgggcatggccgacaaaagcgtggccagtgggggttggcaggaaccagagaacccacatacgcaacggatgaataagctgatcgaatattatcagcagctggcacaaaaggaaaaagtggaacgtgatagaaagaagttagctaggagacggtag

SEQ ID NO: 31118 - DNA, 648 bp, synthetic construct
  source 1..648: mol_type = other DNA; note = Synthetic coding sequence
atgcccggagaagccaccgagacagtgcctgccaccgaacaggaactcccacagtcacaggccgaaaccggatccggtacagccagcgactctggagagagcgtccctggtatcgaagaacaggatagcacgcagacaaccacacagaaagcatggctcgtggccgcagcggaaattgacgaggagcccgtaggtaaagccaaacagtcacggtctgaaaaacgtgctcggaaggccatgtcaaaattgggactgctacaagttacaggtgttacacgtgtaaccatctggaagtctaaaaatatactcttcgtaattaccaagctggatgtctacaagtccccggcatctgacgcctacatcgtgttcggcgaggcaaaaatccaggacttgtcccagcaggcgcagctggccgcagccgaaaagtttcgcgttcagggggaagccgtgggcaacatccaggagaatactcagactccaaccgttcaagaggagtccgaggaggaagaagtggacgaaaccggcgtcgaggttaaagatgtaaagcttgttatgtctcaagcgaacgtaagccgggcaaaggcagtccgcgctctcaagaacaattctaatgacatagtcaacgcgattatggaactcactgtgtag

SEQ ID NO: 31119 - DNA, 432 bp, synthetic construct
  source 1..432: mol_type = other DNA; note = Synthetic coding sequence
atgtctgccacagtggtcgatgccgtgaacgctgcgcctctatcaggctccaaagagatgtccctcgaggagcccaaaaaaatgactagggaggattggcgtaagaagaaggagttggaagaacagcgcaaattagggaatgcccctgccgaggtggacgaggaggggaaggatataaatcctcacatcccacaatatatctccagcgtgccttggtacatcgatcccagcaaaagacccacattgaagcatcagaggcctcagcctgaaaaacaaaagcagtttagcagttccggggagtggtacaagaggggcgttaaggaaaattcaattatcaccaagtaccggaaaggggcatgcgaaaactgcggggctatgactcacaagaagaaagattgcttcgaacggcctcgcagggtaggagccaagtag

SEQ ID NO: 31120 - DNA, 567 bp, synthetic construct
  source 1..567: mol_type = other DNA; note = Synthetic coding sequence
atggcctccgttctttcgagacgactgggaaagaggtctctgttgggggctcgcgttctcggacccagtgcttccgaagggcctagtgcagcccctccctccgaacctctgctcgaaggcgctgcacctcagccatttactacgtctgacgataccccatgccaggagcagcctaaggaagtccttaaggccccttctacatcagggctgcaacaggtcgcattccagcctggtcaaaaggtttatgtctggtatggtgggcaggaatgcaccggactcgtggagcagcattcatggatggaaggacaggtgactgtatggctacttgagcagaaactccaggtgtgctgcagagttgaagaggtgtggttggccgaactccagggaccctgcccacaagctcccccacttgaaccaggggcacaggcccttgcatatcggcctgtctcaagaaacattgacgtgcctaaacggaaaagcgacgctgttgaaatggacgaaatgatggccgctatggtgctaacatcactgtcttgtagccccgtggtccagtcaccccctggctag

SEQ ID NO: 31121 - DNA, 87 bp, synthetic construct
  source 1..87: mol_type = other DNA; note = Synthetic coding sequence
atgatgctaggcacagagggaggcgagggatttgtcgtgaaggtgagaggcctgccctggagttgtagtgctgacgaggtgcaatag

SEQ ID NO: 31122 - DNA, 87 bp, synthetic construct
  source 1..87: mol_type = other DNA; note = Synthetic coding sequence
atggatagcgaactgatgcacagcatagttggatcctaccataagcccccagagagagtgttcgtcccctcctttacccagaattag

SEQ ID NO: 31123 - DNA, 1074 bp, synthetic construct
  source 1..1074: mol_type = other DNA; note = Synthetic coding sequence
atgggcggagccgtgtcagcaggtgaagacaacgatgacctgatagacaatctgaaggaggctcagtatattagaacagaacgtgtagagcaggcattccgcgcaatcgacaggggcgattattatctggaagggtacagggacaacgcgtacaaggacctggcgtggaaacacggtaacattcatctcagtgcaccttgtatatattccgaggtgatggaggccctcaaactgcaacccggtctgagttttctgaacctgggcagcggtactggatacctgagcacaatggtcgggttgatccttggtccctttgggatcaatcacggcatcgagctgcatagcgacgtggtggaatacgccaaagagaagttggagtccttcattaagaattccgatagcttcgataaatttgagttttgtgagcccgcatttgtggtgggtaattgcctacagatcgcgagtgactctcaccagtacgaccggatctactgtggagccggagtgcagaaggatcatgaaaactatatgaagatcctgctgaaggtagggggaattttagttatgccgatcgaagaccaactgacccagattatgcggacagggcaaaacacctgggaatcgaagaatattctcgctgtgtcctttgcccctctggtgcagccctctaaaaacgataacggcaaaccggattctgtagggttacccccttgcgccgtacgaaacttgcaggacctcgcaagaatctatattcggagaacccttaggaacttcataaacgacgagatgcaggccaagggtatcccacagcgtgcccctcctaaacgcaagcggaagcgggtcaagcagcggataaatacttacgtgttcgtaggcaatcagctgatcccgcagccactagattccgaggaagatgagaaaatggaagaggacaacaaagaggaggaggagaaggatcacaacgaggctatgaagcctgaagaaccacctcagaacctgttgagggaaaagataatgaagcttccactccccgagtcactaaaggcgtatctgacctacttcagggataaatag

SEQ ID NO: 31124 - DNA, 483 bp, synthetic construct
  source 1..483: mol_type = other DNA; note = Synthetic coding sequence
atgccatccatcaaactacagagctccgatggggaaattttcgaggtggacgttgaaatagccaagcagtctgtgaccataaaaacaatgctggaggatttgggaatggacgacgaaggtgatgacgatcctgttccgctgccaaatgttaatgccgctatcctgaagaaggtgattcagtggtgcacacaccataaagatgaccccccacctccagaagacgatgagaataaagaaaagcggacagacgacattccagtctgggaccaggaatttctaaaagtggatcagggcacactcttcgagcttattctggcggcaaactatctggatatcaagggtctgttggacgttacctgcaaaaccgtcgcaaatatgatcaaaggaaaaacgcctgaagaaattaggaagactttcaatatcaagaacgacttcaccgaggaggaagaggcccaggtcgggagtacgcagttctgtctgtag

SEQ ID NO: 31125 - DNA, 342 bp, synthetic construct
  source 1..342: mol_type = other DNA; note = Synthetic coding sequence
atggacagcgaattgatgcacagcatagtcgggagctaccataagcccccagaacgggtcttcgtgcccagtttcacccagaacgagccatcccagaattgtcaccctgccaatctcgaagtgacctccccaaagattcttcactctcccaactctcaggccttaattctagccctgaaaacactgcaagagaaaatccatcggcttgagcttgagcggacccaggcagaagacaatctgaatatcctgtcacgggaagctgctcagtacaaaaaggccctcgagaatgaaaccaacgaaagaaatctggcccatcaggaactgatcaagcaaaagaaatag

SEQ ID NO: 31126 - DNA, 309 bp, synthetic construct
  source 1..309: mol_type = other DNA; note = Synthetic coding sequence
atggcaagcgtcttaagcagaagactaggaaagcgctcattactcggcgcaagggttctgggacctagcgcaagtgagggaccttcagccgctcctccctcagaacccctgctcgagggcgcagctcctcagccatttacaactagcgatgatacaccctgtcaggagcagcccaaagaggttctaaaagccccaagtacaagtggtttacagcaggtggcgttccaacctggtcagaaagtgtacgtatggtacgggggacaggagtgtaccggcctggtggaacagcattcctggatggaaggttag

SEQ ID NO: 31127 - DNA, 492 bp, synthetic construct
  source 1..492: mol_type = other DNA; note = Synthetic coding sequence
atgccatccattaagctccagtcttccgacggggagattttcgaggtggacgtggagattgccaaacagtcagtgaccatcaagaccatgctggaggacctagggatggatgatgagggcgacgatgatcctgtgcccctgcccaatgtgaacgcagcgatccttaagaaggtgattcagtggtgcacacaccataaggatgaccctccaccaccggaggacgacgaaaacaaggaaaagcggactgatgacattccagtctgggaccaggaattccttaaagtggaccagggcacgctttttgaactcatcctcgcggcaaactacctggatatcaaaggcttattagacgtgacctgtaagaccgtggctaatatgatcaaaggcaagacccccgaagagatccggaagacatttaatatcaagaatgacttcaccgaggaggaggaagcccaagtgcgcaaggaaaatcaatggtgcgaagagaagtag

SEQ ID NO: 31128 - DNA, 441 bp, synthetic construct
  source 1..441: mol_type = other DNA; note = Synthetic coding sequence
atgtgtccagggaattggttgtgggcctccatgaccttcatggcgaggttcagcaggagctccagccgcagtcccgtgaggactcgtggtactttggaggagatgccaactgtgcagcacccttttctcaacgttttcgaacttgagagacttctgtacacaggcaaaacagcctgcaatcacgctgacgaagtctggccagggctgtacttgggcgatcaagatatggccaacaataggcgcgagctccggaggctaggcattacccacgtgctaaacgcctctcacagtaggtggagggggactcctgaggcatacgagggcttaggtattcggtatttgggcgtagaggctcacgatagtcccgcatttgacatgtccattcattttcagacagctgctgatttcatacacagagccctgtcacagccaggcggttag

SEQ ID NO: 31129 - DNA, 1542 bp, synthetic construct
  source 1..1542: mol_type = other DNA; note = Synthetic coding sequence
atggccagcgtcctgtcaagacgcttagggaagagatcactgctgggggcaagagttctcggaccttccgcatcagaaggcccttccgccgctcctccgagcgaacccctgctggagggcgctgcccctcagccttttacgacaagcgacgacacaccttgtcaggagcagccaaaggaagtgctcaaagccccttccaccagcggcttgcaacaagtcgcgtttcagccagggcagaaggtatacgtctggtatggcggacaggagtgcacaggcctcgtcgaacagcattcctggatggagggtcaagtcacagtctggctgctcgaacagaagctacaggtttgttgtagagtagaagaggtctggctcgcagagttgcagggaccctgtccccaggcgccacctctggaacccggagctcaggcattagcttataggcctgtgtctcggaacattgatgtgccaaaacgcaaatctgatgctgtggagatggatgaaatgatggccgcaatggtgctgaccagtctctcgtgttctcccgtggtccagtccccccctgggaccgaggcgaattttagtgccagtcgcgctgcctgtgacccttggaaggagagcggagacatcagcgactccggctctagcacaacaagcgggcactggtctggcagtagtggagttagcacaccgtcacccccacaccctcaggcctccccaaaatatctgggagacgcctttggcagtcctcagacagaccatggcttcgagaccgatcctgacccttttctgctggatgaaccagcgcctagaaagagaaaaaactcagtaaaggtcatgtataaatgcctttggcctaattgtgggaaagttcttagaagcattgtgggcatcaagagacacgtgaaggcgctgcacctcggcgacaccgtcgactccgaccagttcaaacgggaagaggacttctactatacagaagttcagctgaaggaggagagcgcagcagccgcagctgccgcagcggcaggaacccccgtgcccggtacacctactagcgaacctgcacccacgcctagcatgacaggcctccccctcagtgctcttccccctccattacacaaagctcaaagtagcggtccagaacatccagggccagagtcgtccctcccgtcaggagccctgtccaagtcagccccaggtagtttttggcatattcaggccgaccatgcatatcaggccctacccagcttccaaatacctgtgagcccacacatttacaccagcgtcagttgggccgctgccccatccgctgcctgttctctcagccccgtgcgatccagatctcttagtttcagtgaaccccagcagcccgcacctgccatgaaatcacacttaatcgtcacttctccccctcgcgctcagtccggtgccagaaaagcgaggggcgaggccaagaagtgtagaaaggtgtacgggattgagcacagggaccagtggtgtaccgcctgtcggtggaagaaggcctgtcagaggttccttgattag

SEQ ID NO: 31130 - DNA, 438 bp, synthetic construct
  source 1..438: mol_type = other DNA; note = Synthetic coding sequence
atggcagtctccactggcgtgaaggtgccacgcaatttcagacttctcgaggaactcgaagaaggccagaagggggttggggatggcactgtttcctggggactggaagatgatgaggatatgacactcacccggtggaccggaatgataataggccctccaaggacaaactatgaaaacaggatctactcactcaaggtggaatgcggtcctaagtacccagaagcccctccgagcgtcagattcgtgactaaaatcaatatgaacggcatcaataacagcagcggcatggtcgacgctcggtcgattcccgtcctggcgaagtggcaaaactcctattccatcaaggtcgtccttcaagagctgcgtcggctgatgatgtcaaaggaaaatatgaagctgcctcagccccctgaaggccagacctacaacaactag

SEQ ID NO: 31131 - DNA, 1542 bp, synthetic construct
  source 1..1542: mol_type = other DNA; note = Synthetic coding sequence
atggcgagcgtgctgtcacgccgactggggaaacggtccctcctgggggcacgggtcttgggaccatctgcgtctgaagggccttccgctgcaccgccttctgagcctctgctggaaggcgcagcaccccagcccttcaccactagcgacgacactccttgtcaggagcagcccaaagaggtgttaaaggctcccagcacgtcaggcttgcagcaggtggcctttcaaccagggcagaaagtctacgtctggtacgggggacaggagtgcactggacttgtcgagcagcacagttggatggagggacaggtgaccgtgtggctgctggagcagaagttgcaggtgtgctgccgcgttgaagaggtttggctggctgagttacaagggccatgtccccaagctcctccccttgagcctggtgcccaagcgcttgcgtatagacctgtgagccggaatattgacgtccccaaaagaaagtcggatgcagtagagatggacgagatgatggccgctatggtgctgactagcttgagctgcagcccagttgtccagtctccacccggaacggaggccaacttttctgcaagtagagccgcttgcgatccctggaaagagtccggcgacatatctgacagcggcagctcaacaaccagcggacactggtctggctcaagtggtgtctctactccttcacctccccatccccaggcaagtcccaaatacttaggagacgcattcggcagcccccagacagaccacggattcgagacagatccggatcctttcctgctcgatgaaccagcacctaggaagcgtaaaaattccgtgaaggtcatgtataaatgtctgtggcccaattgtgggaaggtactgcgtagcatcgttggcattaagcggcatgtgaaagcactccacctcggtgataccgttgacagcgatcaattcaagcgagaggaagacttttattacactgaagttcaattgaaggaggagtctgccgctgccgcagccgctgcagcggctggtacccctgtgcctggcactccgacatcagagcccgcacctacaccatctatgaccggcctgccactttcggcactcccacccccactgcacaaagcacagagcagcggacccgaacacccgggtcccgagtcaagcctgccctcaggcgctctttctaagtctgctccgggtagcttctggcacatacaggccgatcatgcttatcaggccctgccttcttttcagatccccgtgtccccgcacatctatacttcagtaagttgggcggctgcccctagcgccgcttgtagtctaagtcccgtacgctccaggtccctgtcattctcagagccccagcaacctgctcccgcaatgaaatcccatcttattgttacgagtcctccccgagcacaatctggagcccgaaaagctcgaggtgaggccaagaagtgtaggaaggtatacggtatcgaacatcgagaccagtggtgcactgcgtgccgttggaaaaaagcttgtcagcgttttctggattag

SEQ ID NO: 31132 - DNA, 57 bp, synthetic construct
  source 1..57: mol_type = other DNA; note = Synthetic coding sequence
atgccatcgattaaacttcaaagcagcgacggggagatcttcgaggtagacgtctag

SEQ ID NO: 31133 - DNA, 1935 bp, synthetic construct
  source 1..1935: mol_type = other DNA; note = Synthetic coding sequence
gttgctagcgaggggagtgtgaggcgcccaagcgggccagtacccgcacctcagccacccgcttttcggtttgtgtcacgtccgggtcgtgcacggagcgagagtgagactctagaacgctccccaccacaaagccccggtcctgggaaggccggagacgctcctaatcgccgaagcgggcacgtgcgcggtgccagggtgctttccccccctggtcggagagcgcgactgagttctcctggcccaagccgcagctccgaggcccgagaagaactgcgacgccacttagtgggactcattgaaaggagcagggtcgtgatctttagtaagagttactgtcctcatagcactagggtcaaagagctttttagctccttgggagtcgaatgtaacgtgttagagctcgaccaggtggacgacggcgctcgggtgcaggaggtactgagcgagatcacaaatcagaaaacggtgcccaatattttcgtgaacaaggtacatgtgggcggttgcgatcagactttccaggcctaccagtcagggcttctccaaaagctgctgcaggaggatctcgcatacgattatgacctcataataatcggtggcggttctgggggactcagctgcgcgaaggaggccgcaatccttgggaaaaaggttatggtcctcgatttcgtagttccatccccccaaggcacctcttgggggctaggagggacatgcgtgaacgtgggctgcatcccaaagaaattgatgcaccaagcggcactcttgggtcaagccttatgcgactccagaaagttcgggtgggagtataaccagcaagtgcgccataactgggaaaccatgactaaagctatacagaaccacatctccagcctgaactggggatacagactttctctacgagagaaggccgttgcctatgtgaattcatacggcgaattcgtggaacaccacaagatcaaggcaaccaataaaaaggggcaggaaacatactacactgcagcccagttcgtgatagcaacaggtgaaagacccaggtatctgggtatacagggagacaaagaatactgcatcacctctgatgacttatttagtctgccatactgcccgggtaagaccctcgtggtgggcgcatcatacgtggcacttgagtgtgctgggtttctggccggattcggccttgatgtgacggtcatggtgagaagtatactccttcggggattcgatcaggagatggctgaaaaggtggggtcatatatggaacagcacggcgtaaaatttctgcgtaagttcattccagtaatggtgcaacaactggagaagggaagtccgggaaagctcaaagtcctggccaaaagcaccgaaggaaccgaaaccattgagggggtctataacactgttttgttggccattgggcgagactcttgcacgcgcaagattggcctggagaagatcggggtgaagatcaacgagaagagcgggaaaatccctgttaatgatgtggaacagaccaatgttccctatgtctatgctgtgggcgacatcttagaggacaagcctgagttgacacctgtggcgattcagagtgggaagctcctggctcagagactgttcggcgcatctctagagaagatttaccatacactattttggcctctggaatggaccgttgctggtcgagagaacaatacttgttatgccaaaattatttgcaacaaattcgaccatgatcgggtgataggctttcacatcctcggacccaacgcaggggaagttacccagggattcgccgcagcaatgaagtgtggcctgaccaaacagcttctggacgatacgattggcattcatcccacctgtggcgaggtatttacgacccttgagatcaccaaatcgtccggcctcgacataacgcagaaaggttgctgagggtag

SEQ ID NO: 31134 - DNA, 1338 bp, synthetic construct
  source 1..1338: mol_type = other DNA; note = Synthetic coding sequence
atgaacaaaggtattagtagtatcccgatcaacctgagggtgtacagtccacacgtgttgaacctgacccttatagaccttcccggtattacaaaagtcccggtaggcgaccagccccctgatattgagtatcagatccgggaaatgataatgcaatttatcacaagagagaactgcctaattctggcagtgaccccagcaaatacggacctggccaatagcgatgccttaaagctggccaaggaggtcgatccacagggactgagaacgatcggtgtgatcaccaagctggatctaatggacgaaggtaccgatgccagagacgtgctagaaaataagctcctccctcttcgcagaggttatgtcggcgttgtcaatcgcagccaaaaagacatagatggtaagaaagatattaaggccgctatgctggcagaaagaaagttttttctgtcacatccagcttaccggcacatagccgatcgaatgggcacacctcatcttcagaaggtactgaatcaacaactcacaaatcatatacgagatacacttcctaactttagaaacaagctccagggtcaactgctgtctattgagcatgaggtggaggcatacaagaattttaagccagaggatccaacacgcaaaactaaggcgcttcttcagatggtccagcagttcgctgttgactttgaaaaacgaatcgagggctctggagaccaggtggacacactggagctgagcggaggagcaaagatcaaccggatttttcatgagcggtttccattcgaaatcgtgaagatggagtttaatgagaaagagctccggcgagagatttcctatgccatcaagaatatccacggtattaggaccggactgttcacgcccgatatggctttcgaggccatcgtcaaaaaacagattgtgaaactcaaaggcccaagtctcaagtcagtggacttggtaatccaggagctgataaacactgtcaagaaatgcacaaaaaaactcgccaacttcccccgactctgtgaggaaacagagaggatcgtggctaatcacatcagagagcgtgaagggaagaccaaggaccaggtgctccttctgatcgatattcaggtatcctacattaacactaatcatgaggacttcatcggatttgccaatgcacagcagagatcatctcaagtgcacaaaaaaaccacagttggtaatcaggtgatccgaaaaggctggctgacgatctctaacattggcatcatgaagggagggtcaaaaggttactggtttgtgctcaccgccgagtctctgtcttggtacaaagatgacgaagagaaatag

SEQ ID NO: 31135 - DNA, 1560 bp, synthetic construct
  source 1..1560: mol_type = other DNA; note = Synthetic coding sequence
atgctgcagctgatggattcaggaataacgatctgtctgaggaatggtgcagcatctgtgttcaaaaagaaagaatggagcactcagggtgaagaaaacaagcaagatagtaaattgaagaagctgtctgaggactccctaaccaagcagcctgaggaagtgttcgacgtgctcgagaagctgggggaaggctcttatggttcagtgttcaaggccattcataaggagtctgggcaggttgtggccattaaacaagttcccgtagagtcagatctccaggaaattattaaggagatctcgattatgcaacagtgcgatagtccatacgtagtgaagtactatggctcttacttcaagaacaccgatctgtggatagttatggagtactgtggtgctggttcagtgagcgacataatccgcttgagaaataagactttgattgaggatgagatcgctacgattctaaagtccactctcaagggactagagtacctccacttcatgcgcaagatccaccgggatatcaaagcgggaaacattctccttaacacagaggggcatgcaaaactggcggattttggtgtagctggccagttgaccgatacaatggcgaagcgtaacacggtgatcggcaccccattctggatggctcccgaagtgatccaagaaatcggttataactgtgtcgccgatatttggtctctgggaattacttcaattgagatggccgagggtaagcctccctatgccgacatccaccccatgcgcgctatattcatgattcccacgaatccccctcctacgttcaggaaacccgaactgtggagcgatgatttcaccgatttcgtcaagaagtgtttggtgaagaacccagagcagagggctaccgccacgcagttgttacagcatcccttcatcaaaaatgcaaagcccgtatcgattctgagggatctcattaccgaggctatggaaattaaggcaaagaggcacgaagagcagcagcgtgaactcgaagaggaggaggagaactcagacgaggacgaactggattcccacaccatggtgaagacaagtgtcgaatctgtggggactatgagggcaactagtactatgagcgaaggggctcagacaatgatcgagcataactctacaatgcttgaatcagacctgggtaccatggtcatcaactcggaagacgaggaagaggaggacggcacgatgaaaaggaatgccacatcaccgcaggtacagagaccaagcttcatggactacttcgataagcaggattttaagaacaagtcacacgagaattgtaaccagaacatgcatgaaccattccccatgagtaagaatgttttccccgacaattggaaggttccccaagacggtgactttgatttcctgaaaaaccttagtttagaggaactccagatgcgcctaaaggcactcgacccgatgatggaaagggaaatcgaagagctcagacagaggtacaccgccaaacgacaacctatcctggatgctatggatgccaaaaagcgtcgccagcagaacttttag

SEQ ID NO: 31136 - DNA, 1392 bp, synthetic construct
  source 1..1392: mol_type = other DNA; note = Synthetic coding sequence
atgaagatcatggactcagagttgatgcactcgatcgtgggcagctaccacaagccacccgagagggtattcgtgccatctttcactcaaaacgagccctcccaaaattgccaccccgctaaccttgaagttacgtccccaaaaatcctgcactctcctaattcccaagccctgattcttgctctgaaaaccctccaggaaaaaatccaccggttggagctcgagcggacccaagcagaggacaacctcaacatactcagcagggaagccgcacagtataaaaaagctctggaaaacgagacaaacgaaagaaaccttgcccatcaggaacttatcaagcagaaaaaggacatatccattcagttgagcagcgcccagtcccgctgtacactccttgaaaagcagcttgagtatacgaagcggatggtgctgaatgtcgagagagaaaagaacatgattctcgagcaacaggctcagctccaacgcgaaaaagagcaggatcaaatgaagctgtatgccaaactggagaagttagatgtgttggagaaagaatgtttcagactcaccaccacacaaaaaacggctgaggataaaattaaacacttggaagaaaaattaaaagaggaggagcaccagcgcaaactgttccaggacaaggcctcagagcttcagacaggtctggaaatcagcaagattattatgtcttccgtctccaaccttaagcactcaaaagaaaagaagaagagctccaagaagacaaagtgcatcaagaggaggccaccctggcaaatttgcagcaaattcggggcacttccatttgtagccgagaagatgcgccagcatagagaccctcacatcttgcaaaaacccttcaatgtgaccgagacaaggtgcctgcccaaaccctcaaggacgacgtcctggtgtaaagccattccacccgactcagagaagagtatctccatctgtgacaacctttctgaacttcttatggctatgcaggacgagcttgaccagatgtcgatggaacatcaagagctgctgaaacagatgaaggaaaccgagagccattccgtgtgcgatgacattgagtgcgaacttgagtgtctcttaaagaaaatggaaatcaagggggagcaaatctcaaagttgaagaagcatcaggacagtgtatgcaagctacaacagaaagtacagaactcaaagatgtccgaggccagcgggattcagcaggaggacagctatccgaagggttccaaaaatatcaagaattctcctagaaagtgcctgactgatactaacctgtttcaaaaaaactcttcttttcaccccatcagagtgcataacttgcagatgaagttgcgaagagacgacattatgtgggaacagtag

SEQ ID NO: 31137 - DNA, 1050 bp, synthetic construct
  source 1..1050: mol_type = other DNA; note = Synthetic coding sequence
atggaggatccccagtctaaggaaccagctggggaagccgtggccctcgctctcctggagagcccacgccctgaaggaggggaggaacccccaagaccctcgccagaggaaacccagcaatgtaagttcgatgggcaggagactaaggggtctaaatttatcacctcatctgctagcgattttagcgacccagtctacaaagagatcgctattacaaacggatgcatcaatagaatgtctaaggaggagctgagggctaagctatcggaattcaagctggagacacgtggtgtgaaggacgtcctgaagaagcgattaaagaactactataagaagcagaaactgatgttaaaggagtccaattttgcagacagctactacgattacatatgtattatcgacttcgaggctacatgtgaagagggcaacccacccgaatttgtgcacgagatcatcgagttccccgtggtactgctgaacacccacactttagagatcgaagatacctttcagcagtatgtgcgcccagagatcaacactcagctctccgacttttgtatcagcctgactggtataacccaggatcaggttgatcgtgcagacactttccctcaggtgttaaagaaagtgattgactggatgaagctcaaggagttaggcaccaagtataaatactcactgctgaccgacggatcttgggacatgagtaaattcctaaatatacaatgccagctctcccggctcaagtacccaccattcgccaagaagtggattaacatcaggaaaagttatggcaacttttataaggttcctaggagtcagaccaagctgacgatcatgctggaaaaactggggatggattatgacgggaggccacactgtggcctggatgattcaaaaaatatcgcgcgaattgctgtgcgcatgctgcaggatggatgcgagttgaggatcaatgaaaagatgcacgctgggcaactaatgagcgtttcttccagcctgccaatcgaggggaccccacctccacagatgccacattttaggaagtag

SEQ ID NO: 31138 - DNA, 636 bp, synthetic construct
  source 1..636: mol_type = other DNA; note = Synthetic coding sequence
atgtgtccagggaactggctgtgggcctctatgacttttatggccaggttctcaagatccagctctagatcaccagtgaggactcgtggtacactggaagaaatgcccactgtgcaacaccccttcctgaacgtgtttgagttggagcgtctactttatactggaaagaccgcctgcaaccacgcagatgaagtttggcccggactctacttgggagaccaggacatggccaacaatcgccgagaacttcgcaggttgggaatcacacatgtactcaatgcaagccatagcaggtggcggggaaccccagaagcctacgaggggctcggaattcggtatctcggtgtggaggctcatgactcacccgcattcgatatgtccatccactttcagactgcagcagatttcattcaccgcgctcttagccagccgggtgggaaaatactcgtccactgcgccgtgggcgtctcacgcagcgcgaccctggtgttagcttatctgatgctctaccatcatcttacccttgtggaggcaataaagaaagttaaggatcacagaggcatcatcccgaatagaggtttcttacgccaacttctggctctcgacagacgccttcggcaggggttggaagcctag

SEQ ID NO: 31139 - DNA, 438 bp, synthetic construct
  source 1..438: mol_type = other DNA; note = Synthetic coding sequence
atgatcccaatatggaagcagcaggctaggcccggtgacggccctgtgatctgggactatcacgtggtcctgctgcacgtaagctccggaggacagaatttcatctacgacctcgacactgtgctgccatttccttgcctcttcgatacctatgtggaagatgccttcaagagtgacgacgatatccaccctcagttccggcgtaagttcagagtgattagagctgattcataccttaaaaatttcgcgtctgaccgaagccacatgaaggattcttctggcaattggagggaacctcccccaccctatccgtgtatagaaacaggggattccaagatgaatcttaacgactttatttccatggatcccaaagtgggctggggagctgtctacacactgagtgaatttactcatcgctttggttccaaaaactgctag

SEQ ID NO: 31140 - DNA, 258 bp, synthetic construct
  source 1..258: mol_type = other DNA; note = Synthetic coding sequence
atgagtgataagagtgacttgaaggctgagctcgaacgaaagaagcaacgtctagctcagattcgcgaagagaagaagaggaaagaggaagagaggaagaaaaaagaggccgacatgcaacagaaaaaggagcccgtgcaagatgattcagatttagaccgaaagcgcagggagacagaagccctgttgcagtccatcggtatctcaccagagccccctctggtgcctacccccatgtctccttctagcaaaagctag

SEQ ID NO: 31141 - DNA, 588 bp, synthetic construct
  source 1..588: mol_type = other DNA; note = Synthetic coding sequence
atggacagcgaattgatgcattctattgtgggtagctaccataagcctccggaacgagtgttcgtccctagtttcacacaaaatgagcctagtcagaactgccatccagcaaacctcgaggtaacttctcccaagattctgcattcccccaacagccaggccctcattctggcgctgaaaaccttacaggaaaaaattcaccggctcgagctcgagcgaacacaggcggaggacaacttgaacattctgtcacgggaggctgcgcagtacaaaaaggccttggagaacgaaaccaatgaaagaaatctcgcacatcaggaactgataaagcagaagaaggacatcagtatccaattatcatccgcccaaagccgatgtactttgctcgagaaacaactggagtacacaaagaggatggtattaaacgtagagcgcgaaaaaaatatgatcttagagcagcaagcgcaactgcagcgcgagaaggaacaagaccagatgaagctgtacgccaagctagaaaaattggacgttcttgaaaaggagtgttttaggttgacaaccacccaaaaaacagctgaagacaaatag

SEQ ID NO: 31142 - DNA, 1272 bp, synthetic construct
  source 1..1272: mol_type = other DNA; note = Synthetic coding sequence
atggaagacaaacgatccttgtcgatggccagatgtgaggaaaggaacagcagaggacaggatcatgggctggagagagtaccgtttcctccacaattgcagagcgaaacatacttgcaccctgctgacccaagtccagcctgggatgaccccggttctacgggcagccctaacctgcggctgttgacggaggagatagcctttcaaccactcgctgaggaggcctccttccgaaggccccaccccgacggagatgtccctcctcaaggggaagataacctcctcagcttaccatttccccagaagctctggcgcctggtgtcttccaatcagttctcctcgatttggtgggatgacagtggagcctgccgcgtgataaaccaaaaactgttcgaaaaggagatcttgaagcgggatgttgcccacaaggtcttcgctacaacttcaattaagtctttttttagacagttaaatctctatggtttccgcaagcggagacagtgtacgttcaggaccttcacacggatcttctccgccaagcgcttagtgagtatactcaataaattggaattttattgccatccatattttcaaagagactccccacatttgcttgtgcgcatgaagagaagagtgggggttaagtcagccccaaggcaccaggaagaggataagcctgaggctgcgggtagctgcctcgctcccgcagacaccgagcagcaagaccacacaagtcccaacgagaatgaccaagtgacaccgcagcatcgagagcccgctggccctaatacacagattcggtcgggaagcgcaccacctgcaactcccgtcatggtgccggactccgccgttgcgtctgacaacagtcccgtgacacagccagcaggcgagtggagtgagggcagccaggcccacgtcactcccgtggccgcagtaccaggacccgcagctctgcctttcttatatgtgccaggttcacccacccagatgaattcatatgggccagtggtggcccttccaacggcgagccggagcaccctggccatggacaccacaggcctgcctgctcccggtatgttacccttctgtcacctgtgggtgccagtgacccttgttgcagccggtgctgcccaacctgccgcttcaatggtgatgtttcctcacctccctgccttgcaccaccattgcccccatagtcatcgaacctctcaatatatgcccgcatccgacggccctcaagcttacccggattacgccgaccaatccacatag

SEQ ID NO: 31143 - DNA, 2097 bp, synthetic construct
  source 1..2097: mol_type = other DNA; note = Synthetic coding sequence
ggagtcggaggtcggggagagaggctcccgaggggattcgcgagagtcgtgagagtcgcttccgaagggtcggtgcggcgaccctctggcccagtgccagctccccaacctcccgcattccggttcgtgagtaggccaggaagagcgcgaagcgagtccgagacactggaacgctcccctccccaatctcctggcccagggaaggcaggagatgctcccaatagacgatccggacatgtacgtggtgccagggtactgtctccacctggacgcagagccagactgtctagcccaggtccttccaggtcttccgaggctagggaggagctgcgtagacacctagttggactgatcgaaaggagcagggtggtgattttcagcaagtcctattgcccccacagtacaagagtcaaagaactgttctccagcttgggggtggagtgtaatgttctggagcttgaccaagttgatgatggggcacgtgttcaggaggttctgagcgaaattactaatcagaaaacggtcccaaatatcttcgtcaacaaagtgcacgtcggaggatgcgatcagactttccaggcgtatcagagcggactactccagaagcttctgcaagaggacttggcctatgattatgatctcatcatcattggcggtggatctggaggcctcagttgtgccaaggaggctgccatactcggcaaaaaggtaatggtgttagatttcgtagtgccgtctccacagggcaccagttgggggctcggcggaacatgcgtgaatgtgggctgtatacctaagaagctcatgcatcaggccgctttactgggtcaggccttgtgcgatagccgcaagttcggctgggaatataaccagcaggttaggcacaactgggaaacaatgacaaaggcaatacagaatcacatcagttctctaaattggggctaccggcttagtctgagggaaaaggcagtggcttatgtgaatagctatggtgaattcgtagaacaccacaagattaaagcaacaaacaaaaagggacaagagacgtactataccgccgcacagttcgtgatcgcaacaggcgagagacctcgctacctggggattcagggcgacaaggaatactgcattacttcagacgacctcttctccctcccctactgtcccggtaaaactctggtggtgggcgcttcgtatgtcgcactggagtgcgcaggttttctggctggctttggacttgatgtgacagtgatggtacgcagcattttgttgaggggattcgatcaagaaatggcagaaaaagtgggaagctatatggaacaacacggggtgaagtttctccggaagtttattcccgtgatggtacagcagctcgagaagggctcccctggtaagctcaaagttctggccaagtctactgaaggaactgagacgattgaaggagtgtacaacacggtcctgctggccatcgggagagactcatgcacccggaagatcggactggagaaaattggtgtgaaaatcaatgaaaaaagcggcaagatacccgttaacgacgttgaacagactaatgtcccctacgtgtacgccgtgggagatatcctcgaggacaaacccgagctaacccctgtagctatccaatcaggaaagttactggcccagagactgttcggcgcttcactggagaaatgtgactacataaatgtgccaaccactgtgttcacccccctcgagtatggttgttgcggactgtcagaggaaaaggcaattgaagtatataaaaaggagaatctcgaaatttatcacaccctattctggccacttgagtggaccgtagctggacgggagaacaacacgtgttacgctaaaatcatttgtaataagtttgaccatgatcgggtgattggcttccacatattaggcccaaacgcgggtgaagtaactcagggatttgctgccgcaatgaagtgtgggctgaccaagcagctgttagacgatacaataggaattcaccccacctgcggcgaggtcttcactacacttgaaatcactaaatcatccggtctcgatattactcagaagggttgctgaggctag

SEQ ID NO: 31144 - DNA, 609 bp, synthetic construct
  source 1..609: mol_type = other DNA; note = Synthetic coding sequence
atgaccggctccaactctcacattacaatcctcacattgaaggttctcccccatttcgagagcctcggaaagcaggagaaaattcctaataaaatgagcgcattccgaaaccactgtccacacctggacagtgtcggtgaaattacaaaggaggacctgattcagaaaagtctgggtacctgccaggactgtaaggtgcagggacctaacctttgggcatgcctggaaaaccgttgcagctatgtgggctgtggcgaatcacaagtcgaccattcaaccatccacagccaagagacaaagcattacctgacagtcaacctgaccaccctgcgcgtgtggtgctacgcctgtagcaaggaggtgtttctggatcgaaagctagggactcagcccagcttgcctcacgtgaggcagccccaccagatacaggagaattctgtccaggactttaaaatccctagtaatactaccctgaagacccccctcgttgcagtgttcgatgacctggatatcgaagcggacgaagaggatgaattgcgggcacgcggattaaccggattgaaaaacattggcaacacgtgttacatgaacgccgcactgcaagcgtag

SEQ ID NO: 31145 - DNA, 1443 bp, synthetic construct
  source 1..1443: mol_type = other DNA; note = Synthetic coding sequence
atggagactgatctgaacagccaggaccgaaaagatctggataagttcatcaaattcttcgccctaaagacggtccaggtaatcgtccaggcgcgactcggagagaaaatatgcacccgttcctctagctcccccacgggatctgactggtttaatctcgccattaaggacataccagaagtgactcatgaagccaagaaagcactggcaggccagctgcccgctgtgggcaggtccatgtgtgtcgaaatctcgctcaaaacaagcgaaggggactcgatggaactagaaatttggtgcttagagatgaacgagaaatgtgacaaagagataaaagtctcttatactgtgtataatcgcctttccctattattaaagtccttactggcgatcaccagagtcactcccgcatataggctgtccaggaaacagggacacgagtacgtcatcctctatcgcatctacttcggcgaggtgcagttgtccggtctgggggagggctttcagaccgtgagagtaggcactgtgggaacacctgtggggactatcacactctcgtgtgcatacaggatcaacttagcatttatgagtacacggcagttcgagaggacaccccctattatgggcattatcatagaccactttgtggatcgcccatatcctagctccagtccaatgcacccatgcaactaccggaccgcaggggaggatacaggagtaatttatccttctgtggaagattcccaagaggtgtgcactactagtttcagcacaagtcctccttcacaacttatggtacccggaaaagaaggaggagtgcctctggcccctaaccagcccgtccacggcactcaggccgatcaggagcgcctcgcaacctgcaccccctccgatcgaacgcattgtgcagccaccccttcttccagtgaggacactgaaaccgtgagcaactcttctgagggtcgggcatcaccccacgatgtcctggagactatcttcgtgaggaaggttggggcatttgtgaataaacccatcaaccaggtgaccctgactagcttagatattccctttgccatgtttgcacccaagaacctggaactcgaggataccgaccctatggtcaatccccctgactctccagaaacagagtcaccactgcagggcagtctccactcggatggaagttctggaggctccagcggcaacacacacgacgacttcgtgatgatagactttaagcccgctttctccaaagatgacatcctacccatggatctagggaccttctatagagaattccaaaatccaccacaactctcatcactcagcatagacatcggcgcacagtctatggccgaagatctcgactccctaccagagaaattagcagtccatgagaagaacgtgcgagagtttgacgcctttgtggagactcttcagtag

SEQ ID NO: 31146 - DNA, 309 bp, synthetic construct
  source 1..309: mol_type = other DNA; note = Synthetic coding sequence
atgctgagcgaagaggagaaggaggagctcaaagccgagctggttcagctagaagacgagattaccactctcagacaggtcctatcggccaaagaacgtcaccttgtcgaaattaaacaaaaactcgggatgaacctaatgaacgagcttaaacagaacttttctaaatcttggcatgacatgcagaccacgactgcctataaaaagacccacgagacccttagccacgcagggcagaaagctaccgctgcatttagcaatgtcgggacagcgattagcaagaagttcggggacatgcgcaggaagtag

SEQ ID NO: 31147 - DNA, 318 bp, synthetic construct
  source 1..318: mol_type = other DNA; note = Synthetic coding sequence
atgtctcagtctggagctgtgtcctgctgccccggagcaacaaatgggtcactgggccgtagcgacggggtggccaagatgtcacccaaagacttgttcgaacagagaaagaagtattccaatagtaatgtgatcatgcatgagacttcacagtaccacgtgcagcatctggcaaccttcataatggacaagagtgaggctattacaagcgttgatgacgctatcagaaagctggttcagctgtcctctaaggaaaaaatctggactcaagagatgctcctccaggtcaatgatcagtcgttaagactgctcgattag

SEQ ID NO: 31148 - DNA, 222 bp, synthetic construct
  source 1..222: mol_type = other DNA; note = Synthetic coding sequence
atgagcgctttcaggaaccattgcccacacttagatagcgtcggagagattacgaaagaggatctgatacagaaatcactgggtacctgtcaggactgcaaggtccaggggccaaatctttgggcgtgtctcgagaataggtgtagttacgtggggtgtggtgaatcacaggtggatcactccactatccactcccaggaaacaaagcactacctcacctag

SEQ ID NO: 31149 - DNA, 276 bp, synthetic construct
  source 1..276: mol_type = other DNA; note = Synthetic coding sequence
atggcaatgaccgttgtcaccaaagagaagaataagaaagtacctactatttttctcagtaagaaaccgagagagaaagaagtcgattcaaaatctcaggtaatcgaagggattagtcggttgatctgttccgccaagcagcagcagacaatgctgcgcgtatcaatcgatggagtcgagtggtcagatatcaagttctttcagctcgccgcacaatggcctacgcatgtgaagcacttcccagttggactgttctcgggatctaaggcgacatag

SEQ ID NO: 31150 - DNA, 2535 bp, synthetic construct
  source 1..2535: mol_type = other DNA; note = Synthetic coding sequence
atgttttggaagttcgacctgcactcaagctctcatattgacacactgctcgagagggaggatgttaccctgaaagagctgatggacgaagaagacgtactgcaagagtgcaaagctcaaaacaggaaattaattgagttcctgctgaaagccgaatgtctggaggacctggtctctttcatcattgaggagcctccacaggacatggacgagaagataagatacaaataccctaatatctcttgcgagctcctcacatccgacgtatcccagatgaacgaccggctcggtgaggacgagagtctgcttatgaagctttacagcttcttactcaatgactcaccgctaaaccctctccttgctagcttctttagcaaagttctgtctattcttatttccagaaaacccgagcagatcgtcgattttctaaaaaaaaagcatgattttgtggacctcatcataaaacatataggtacttccgcaatcatggatctactactccgcttgttaacctgtatagagcctcctcagcctaggcaggacgtgttgaactggctgaacgaagagaaaataatccaaaggcttgtcgagatcgtgcacccaagccaagaggaggatcgccactccaatgctagccagtctctctgcgagatcgtgcgtctgtctagagaccagatgttacagatacaaaactcaacagaacctgatcctctgcttgcaaccctcgaaaagcaggagatcatcgaacagctcctgtctaacatcttccacaaggagaagaacgaatctgctattgtttcagctattcagattttattaacgttgttggagactcggcgaccgacttttgagggccatatagagatctgtcctcccggaatgtctcactctgcctgtagcgttaacaagtctgtcctcgaagctatcagaggtagattgggatcttttcatgagctccttctggaaccccctaagaagtccgttatgaagacgacatggggggtactggatccccctgtaggaaatacaagactcaatgtcatcagactaatctccagtctcttgcaaaccaatacctcttcaatcaacggcgacctgatggagctaaactctattggggtgatccttaacatgttctttaagtacacctggaacaactttctccacacgcaagtggagatctgcatcgccctcatcctggcttcacccttcgaaaatacagaaaacgctactattactgatcaggattcaacaggggacaacctgctgcttaaacacctcttccagaaatgccagttaatcgagcggatcctggaagcttgggagatgaatgagaagaagcaggccgaagggggaagaaggcacggctacatgggccacttaacgaggattgccaactgcattgtgcactctaccgacaagggcccaaattcagcgcttgttcaacagctcattaaggacttgcctgacgaggtccgcgagagatgggagacattctgtacctccagtctgggcgagaccaacaagcggaataccgtcgacctggcattcagcgactatcagatgcaacagatgactagcaatttcattgaccagtttggttttaacgacgaaaaattcgcagatcaagatgatataggcaacgtctcttttgacagagtgtcagatataaactttactctgaacactaatgagagcggcaatattgctttgttcgaggcttgctgcaaggaacgaatccaacagtttgacgacggaggttccgacgaagaggatatctgggaggagaagcacatcgcctttacacctgaaagccagaggagatcttcttccggatcaactgatagtgaggaaagcacggacagtgaggaagaagatggcgctaagcaggacttgttcgaaccttcctccgctaatacagaagataagatggaagtggacctgtccgagccacctaattggagcgcaaattttgacgttccaatggaaacgacacatggagcgccattagattcagttgggtcagacgtttggtccaccgaggagccaatgccaacaaaggaaacaggctgggcttcattttccgagttcacatcctccttgtccacgaaagactctctgaggtcgaacagtccagtggaaatggaaacaagcacggaacctatggacccattgaccccttctgcggcagctctcgcagtccagccggaggctgcgggatccgtggctatggaggcttcctcagatggagaggaggacgctgagagtacggataaggtcacagagacagtgatgaatggcggaatgaaggagactctttctctgaccgtagatgcgaaaaccgaaactgcagtgttcaagtctgaagaaggcaagctgtctacttctcaggatgccgcttgcaaggacgctgaggagtgtcctgagaccgccgaggcaaagtgcgccgctcctcgccctccatcatcttccccagagcaaaggacgggacagccctccgctcctggcgacacttctgtgaacggacctgtctag

SEQ ID NO: 31151 - DNA, 2604 bp, synthetic construct
  source 1..2604: mol_type = other DNA; note = Synthetic coding sequence
atgttttggaagtttgacctgcattcgtcaagtcatatagatactctcctcgaaagagaagatgtcacactcaaggagcttatggacgaggaggacgtgctacaagagtgtaaagcacagaaccgaaagctaattgaattcctgctaaaggccgagtgcctcgaagacctcgtgtcctttattatcgaagagccccctcaagacatggatgaaaagattagatacaagtaccctaatatctcttgtgagctgctgacatctgatgtgtcgcaaatgaacgaccgtctgggggaggatgaatcactgctgatgaagttgtattcttttcttttgaatgacagccccctgaatcccctcctcgcgtcttttttcagtaaggtgctttccatactcatttctcgcaagcctgagcagatcgtcgactttctcaagaagaaacacgattttgtcgacttaataataaaacatattggcaccagcgctattatggacttactgctgagattgctgacctgtattgagcctccccagccgcgacaggacgtactgaactggctgaatgaagagaagattattcagagactcgtcgagattgtccacccatcacaggaagaggatagacacagtaatgccagccagtccctgtgcgagatcgtgagactcagccgcgatcagatgctgcagattcagaattctacagaacccgatccccttctagccactctcgagaaacaagagattattgaacagctgctaagcaatattttccacaaggaaaagaatgaatcagccattgtctctgctatacagattctgttaacgcttctcgagaccaggcgcccaacatttgagggccacattgagatctgccctcctggcatgtcacacagtgcctgttctgtcaacaagagtgtcctggaagccatccgcggaagacttggtagttttcacgagctgctgttagagcctcccaaaaagtccgtaatgaaaactacatggggcgtgctcgacccccctgtggggaatacccggctgaatgttataaggctcatatccagcctgctgcagaccaataccagttcgattaacggcgacctcatggagttgaacagtattggggtgatcctgaacatgttttttaagtatacttggaataattttctacacacacaggtggagatctgtattgccttaattctcgccagccccttcgaaaacaccgaaaatgcgacaatcacagatcaagattctaccggggacaacttgctgctcaagcatcttttccaaaagtgccagcttatagagcggatcctggaggcatgggagatgaacgaaaaaaagcaggccgaaggcggacgcagacatgggtatatgggccacctgacccggattgctaattgcatcgttcactccacagacaagggacccaactctgcactggtgcagcaattgattaaggatctgcccgatgaagtcagggaacgatgggaaacattttgcaccagctctcttggggagacaaacaagcgaaacactgttgatctggtcaccacatgtcacattcatagttcttctgacgatgaaatcgatttcaaagagacgggcttttctcaggactcctccctccagcagatgcagcagatgaccagtaacttcatagaccaatttggctttaatgacgaaaaatttgcagaccaggatgatatcgggaatgttagtttcgatagagtgagcgacatcaacttcacgcttaacacaaacgagtctggcaatatcgcattgttcgaagcatgttgtaaagagcggatccagcagtttgatgatggcggaagcgacgaggaggatatttgggaggaaaaacacatcgccttcactcccgagtcccagagaaggtcgtcatctggttcgaccgactccgaagaatctaccgatagcgaagaagaggatggcgcaaagcaggacctattcgaaccttcttccgccaatactgaagataagatggaagttgatctaagcgaaccccctaactggtctgccaactttgatgtgccaatggaaacgacccacggggctcctctcgactccgtgggatctgatgtgtggagcacagaagagcctatgcctaccaaagaaacagggtgggcctccttctccgagttcacttcctcactgtccaccaaggattccttgcgctccaattcccctgtggaaatggagaccagtactgagcctatggaccccctgacaccctctgccgctgccctggcagtacagccagaggcggcaggtagtgtggcgatggaagctagtagcgacggggaggaggacgctgaatccaccgacaaagtcaccgagactgttatgaacggtggtatgaaggagactctcagccttactgttgatgccaaaactgagactgctgtgttcaaaagcgaggagggaaaattgagcacctcacaggacgctgcttgcaaagatgccgaggaatgccccgagaccgctgaggctaaatgcgccgctcctcgacctcccagttcgtctcccgagcagagaaccgggcagcctagcgccccaggtgatacaagtgtgaatgggcctgtatag

SEQ ID NO: 31152 - DNA, 174 bp, synthetic construct
  source 1..174: mol_type = other DNA; note = Synthetic coding sequence
atgacgtctaagaagctcgtgaacagtgtggccggatgcgccgatgacgctctggctggcctggtcgcgtgcaatccaaacttgcaacttctccagggacaccgggtggctctccgcagtgacctggatagcttgaagggacgagttgccctgctgtcagggggagggtcctag

SEQ ID NO: 31153 - DNA, 2709 bp, synthetic construct
  source 1..2709: mol_type = other DNA; note = Synthetic coding sequence
atgtttcccgcacttgagacccatctcaagcagaccataccagacccttatgaagactttatgtatagacatcttcaatattacggctactttaaggctcagagaggatctctgcccaacagcgccacccaccaacatgtccggaagaataaccctcagtgtttacttaacgggagcctgggcgaaaaggacgaccttattcccgacaccctgcagaaggaaaagctcctgtggccaatcagcctctcatccgctgtacaccggcagatcgaggcaattaaccgagactttcactcttgtctcggatggatgcagtggcggggtctttctagtcttcagccgccacccccacgcttcaaagattcaccagccagtgcattccgggtggccggaatcacagattcacatatgttgagcttgcctcaccttcgatcccggcagctgctgtacgacgagctagacgaggttaatccacgccttagggagccacaggagctattctcaatcctgagtactaaacggccactgcaggccccacgatggcccatagaatgcgaggtgatcaaggaaaatatccaccatatcgaatgggcccctcctcagcccgagtacttctatcagcccaagggcaatgagaaagtccctgagatcgtcggagaaaagaaagggacagttgtgtaccagctcgacagcgtcccgattgaagggtcttacttcacgtcctcacgcgtgggcggtaaacggggtattgtgaaggagctagctgttacgcttcagggccctgaggacaatactctgctgttcgagagtcggtttgaatcaggaaacctgcagaaggctgttcgagtggacacatatgagtacgaacttacccttcggacagatctttatacaaataagcacacccagtggttttatttccgggtgcaaaatacccgaaaagatgcaacatatcgtttcaccattgtgaatttgctcaaaccgaaatccttgtataccgtgggcatgaaaccactcctctattcccagctggatgccaacacacggaacatcggctggcggagggagggtaacgaaataaagtactataagaacaataccgacgatggccagcagcctttttattgtttaacatggacaatccagttcccctatgatcaggacacatgtttcttcgcacacttttacccttacacatataccgatctccagtgttacctgctcagcgttgcgaataatcccatccagtcccagttctgtaagcttcagactttgtgtagatctttagcgggtaataccgtgtatctgttgacaatcacaaacccttctcagactccccaggaagctgctgcgaagaaggccgtcgtccttagcgcccgagtgcacccaggagagagcaacggatcttgggtcatgaaagggtttttggacttcatcctctccaattcacctgatgcccagctgcttcgagatatattcgtgtttaaggtgcttcctatgctcaatcccgacggagtgattgtagggaactacaggtgctcgctggccggtcgcgatctgaatagacattataaaacgattcttaaggaatcatttccctgcatttggtacaccagaaatatgataaagaggctcttggaagaacgcgaagtgctgttgtactgcgacttccatggccacagtaggaagaataacatatttctgtacggctgcaacaataataatcgcaagtattggctgcatgaaagggttttccctctgatgctgtgcaaaaatgcaccggacaaattcagttttcacagctgcaacttcaaggtgcagaagtgcaaggaggggacaggcagagtcgtgatgtggcggatgggaatcctgaacagctacaccatggaatccactttcggaggctccaccctgggaaacaaacgggatactcacttcaccatcgaggatctgaagagcctcggctaccatgtgtgcgacacgctgctcgacttctgtgaccccgaccaaatgaaattcacacagtgtctggccgagttgaaggaactgcttcgacaggaaatacacaaaaaatttcacgagctcggccaggatgtcgatcttgaaggctcatggtcagacatctcccttagtgatatcgaaagctcaaccagtgggagcgactcaagcctctcagatggattacccgtgcacctggccaatatcgccgatgaactcacgcaaaaaaagaaaatgtttaagaaaaagaaaaagaaaagtctccagactcggaagcaaagaaacgagcagtaccaaaagaagaatctgatgcagaagctcaaattaactgaggacaccagcgagaaagcagggtttgcgtcaacactgcagaagcaaccaactttttttaagaattctgagaattcatctttcctgcctatgaaaaacgaaaaccccaggctgaacgagacgaacctgaaccgtagggacaaggacacacctctggacccctcaatggctacactgattctgcccaaaaacaaaggcagaatgcaaaacaagaagccaggtttcacagtgtcctgctcccctaagaggacgattaacagcagtcaggaacctgcccctggaatgaagccaaactggcccagatctagataccctgctactaagagaggttgcgctgccatggctgcatatccatctttgcatatctacacctatccctag

SEQ ID NO: 31154 - DNA, 537 bp, synthetic construct
  source 1..537: mol_type = other DNA; note = Synthetic coding sequence
atgaatagaagaaggaagttccttctcgcctcagtacttgctctgcagaacagcagttttatttacccatcatgccaaaaatgcttttcccggataatccttgtgtccaaaagatccaattgccctaaatgcgggtcaaccggggagtcgggcaatgccaattaccgctataagttgagtctgaaggtcgccgaatcaaacaaacttttcgtaatcaccgtttttggatcatgcctcgacacgtttttcggcctgacggccacgggactgcataggtatattcaagaccccaacaagattcctgagacactggacaatgacacaactcagaatcttttgaccaaggcagttgagacctgctttgtaggtcaatccttcatcttcggcgtcacgaacttcgaaaaccagcccggtcagggctctgacgcatctaacttcttacaacagtgttcagatcacaaacgtaaagctaaggctttggttgcctgccagatcgtcctgcccgacccggcaactcaggatgccaagaccaagtag

SEQ ID NO: 31155 - DNA, 441 bp, synthetic construct
  source 1..441: mol_type = other DNA; note = Synthetic coding sequence
atggttgccatggcagaggctgaggcaggggtcgctgttgaggtgagggggctgccaccagctgtgcccgacgagctgctgaccctctatttcgagaacagaaggcgttcagggggaggccctgtcctctcatggcaacgcctgggctgcgggggtgttcttacctttagagagccagcagacgcagagcgagtacttgcccaggccgatcacgaattacatggcgcacagctgagcttaagacctgcacctccaagggcccctgctcgcttgcttctgcaaggccttccacctgggacgaccccccagcgacttgaacagcatgttcaagctctgctccgagcttctggcctgccagtgcaaccatgttgcgctctggcttctcctcgtcccgacagggccctggtgcagctaccaaaacccctgtcagaagccggttag

SEQ ID NO: 31156 - DNA, 348 bp, synthetic construct
  source 1..348: mol_type = other DNA; note = Synthetic coding sequence
atggccggacgcccactgaggatcggcgaccagcttgtactggaggaagattacgacgagacatacattccctcagagcaggagattctggagttcgccagggagatcggaatcgaccccattaaggaacctgagttaatgtggctcgcacgagagggaatcgtcgccccactgccaggcgagtggaagccctgtcaggatatcacaggggatatctactatttcaatttcgccaatggacaaagcatgtgggaccatccttgcgacgagcattatagaagcctcgtgattcaggaacgggctaagctttccacaagcggcgctataaagaaaaaaaagaagaagtag

SEQ ID NO: 31157 - DNA, 1191 bp, synthetic construct
  source 1..1191: mol_type = other DNA; note = Synthetic coding sequence
atgcggacatcttataccgtcacgttgcctgaggacccaccagctgcaccttttcccgcactagccaaggagctgcgtcccagatcgcccttatcacccagtctcctgttatccacatttgttggcctgcttctgaacaaggccaagaactcgaagtccgcccagggactagctggcctcagaaaccttggtaatacttgctttatgaactccatcctccagtgcttaagtaacacaagggagctgagggactattgcctccagcggctgtatatgcgggatctgcatcacggaagtaacgcccatactgctctggtcgaggagttcgctaagctcattcagacaatctggactagctcgccgaacgacgtggtctcaccatctgagttcaaaactcagatccaacggtacgcccctcgcttcgtgggatataaccagcaagacgcacaggaattcctgcgctttctgctggacggcctgcacaacgaagtcaatagagtgaccttgcgcccaaagtctaatccggaaaaccttgaccacctgccagatgacgaaaaggggcgtcagatgtggcgcaagtatctcgagcgggaagattctaggatcggtgatcttttcgtgggccagttaaaatcatctcttacctgcactgactgtggctactgctccacagtattcgacccattctgggacttaagtctccctattgcaaaacgagggtatcccgaagtaacccttatggactgtatgaggctgtttaccaaggaagacgtactggacggcgacgagaaaccaacctgttgtcgttgtaggggcaggaagcgctgcattaagaaattctccatacagcggtttcctaagatacttgtgctgcaccttaaaaggttctctgagtcgaggattagaaccagcaagctgacaacttttgtgaacttcccacttcgggatttagatctccgcgagttcgcctccgagaataccaaccatgctgtgtacaatctgtacgccgtgagtaatcattcagggaccacaatgggcggtcactacactgcatactgtcgatcacctggcaccggggaatggcatactttcaacgactcgtcagtcacgcctatgtcatcttctcaagtgcgcacatctgatgcttacctgctgttctatgagcttgcttcccctccttcacgcatgtag

SEQ ID NO: 31158 - DNA, 633 bp, synthetic construct
  source 1..633: mol_type = other DNA; note = Synthetic coding sequence
atggcggcaagcgttgaacagcgggaggggaccattcaggtgcagggacaggctctgttctttcgcgaggccctgccagggtccggccaggcccgtttttcagtgctcctgctccacgggatcagatttagctcagagacttggcagaatctgggaaccttgcatcgcttagcacaggcagggtaccgggcagtggccatcgatctgccaggtctcggccactcaaaggaggctgccgctccagcaccaattggcgaactggcgccagggagcttccttgctgctgtggtcgacgcactcgaactgggtccccctgtcgtgatttcccctagcctgtcaggcatgtactctttacctttcctgactgctcctggaagccagctcccgggatttgtgccagtggcccctatctgtacagacaagatcaatgcagcaaattatgccagcgtcaaaactcccgcactgatcgtgtacggggaccaggatccgatgggccaaacaagcttcgagcatctgaaacagctccctaaccatcgcgtgcttattatgaaaggtgcaggtcacccatgttatctggataagccagaagagtggcatacaggactcctggactttttacaggggctgcagtag

SEQ ID NO: 31159 - DNA, 1428 bp, synthetic construct
  source 1..1428: mol_type = other DNA; note = Synthetic coding sequence
atggagctctggcaggcagcgctttcaacactgaatcctaaccctactgattcgtgccctttgtacctgaattatgctaccgtggcggctctcccctgtagagtctcacgccacaatagtccatccgctgcacacttcatcacaagactcgtcaggacctgtctgccccctggagctcaccggtgcattgttatggtgtgtgagcagccagaagtttttgcatcggcatgtgccctcgctagggccttccctctgtttacccaccgctcaggggctagcagaaggctggagaagaaaacagtgacagtggagtttttcctggtcgggcaggataatggtcctgtggaagtcagcaccctccaatgtttagccaatgctacagatggtgtgaggctggcagctcgcatcgtcgatactccatgtaacgaaatgaacaccgatactttcctggaagaaattaacaaggtgggcaaagagctcggaatcattcctactatcattagggacgaggagctcaagacccgcggattcggaggcatttatggcgttggcaaggccgcacttcacccccctgccttagcggtgctgtcccatacccccgatggagccacccagactatcgcctgggtggggaaaggaatcgtttatgatactggagggctaagtatcaaggggaaaacaacaatgccagggatgaagagagattgtggaggcgcagccgctgtgctgggagcctttagggccgctattaagcagggcttcaaggacaatttgcatgccgtcttttgcttggcagagaattccgttgggcctaatgctactagacctgacgatatccacctcctctactccggaaagaccgtggaaattaataacacggacgctgaggggcgtctggtgttagccgacggggtatcttacgcttgcaaggatctcggcgctgacataatattggatatggcaacactgacaggagctcaaggcatcgcgactgggaaatatcatgccgctgtgctgaccaactcggcggagtgggaagccgcatgtgtgaaagctgggcgaaaatgtggcgaccttgtgcaccccctcgtctactgtccagaactgcatttttccgagtttacaagtgctgtggcggacatgaagaactctgttgctgaccgagacaactcgccttcgtcttgtgccggactatttatcgcgagccatattggttttgattggccaggggtgtgggtgcatctggacatagcggcacccgtacatgctggagagcgtgccacaggctttggggtagctttgctcctagcactgtttgggcgagcctccgaggacccgctgctgaacctcgtatcccccctgggttgtgaggtggacgtggaggagggggatcttggaagagatagcaagaggaggagactcgtttag

SEQ ID NO: 31160 - DNA, 537 bp, synthetic construct
  source 1..537: mol_type = other DNA; note = Synthetic coding sequence
atggtagccatggcggaggctgaagctggagtcgccgttgaggtgcggggtcttcctccagctgttcccgacgagctgctgaccttatacttcgagaacagacgcagatcaggcggtggcccagtgctaagctggcagagactgggctgcgggggtgtgctcacttttagagaaccagccgatgccgagcgggtgctagcacaggcggaccacgaactacacggtgcgcagttatccctgaggcccgcacccccacgtgcacctgctcggctgttactgcaaggcctcccaccgggaactacgccacagcgcttggagcaacacgtccaggccctcctgagggcctcaggactgcccgttcagccctgctgcgccttggctagtcctcggccagacagggccctggtacagcttccgaaaccgctgtctgaagcagatgtccgcgtcctggaagagcaagcccagaatctgggcctagaagggacactcgttagcctggctagggttccccaggctcgtgcagttcgagtcgtgtag

SEQ ID NO: 31161 - DNA, 1893 bp, synthetic construct
  source 1..1893: mol_type = other DNA; note = Synthetic coding sequence
atggaaaaggtgctgggctgtgaactgctgaagggcttaaacgtgctggatctgggtctgaatatggagatcctcgaagaacaaatgctgcacgagattctttgcagggagtatcccgaactggaaacaagatggcaggacctcaagatacgggctctggacacttgcaaggctgtggaggccgctgaggagagactgctcacaatgctcctctttcaaaatcccaagagacagaagcccgcaaaatttttaaggaacatcgttcgagctcaaggaaagctgtgtcaattgagggcacattgtgaagagctggaggggcagaagctacaggagatggtgctttgggccccataccgacctgtggtgtggcacggtatggctatggtgaaggcactgagtcagcttcaaaaccttttacccctgttctgtatgagcccagagaactggcttgcagtgaccaagcaggcgttggatagcatgaaaccgcgtgagatcaaccacggagaggatcttgcttcacatctcttgcagctgcgagctcatttgacaagacagctgctgggctctaccgtcactgccctgggactcacacaagtaccactggttggtgctctcggcgctctagcccttctgcaggcaacgggtaaagctagtgagctcgaaaggcttgcactgtggcccggactggccgcttccccatccacggtccattcgaagcctgtgagcgatgtggcccgacccgcatggcttggacctaaggcatggcacgagtgcgagatgttggaacttctgcctccattcgtgggcctctgcgctagtctggcaggccattcatcggcttggcaggcctacctctccctgtcttcaacggtattggggcctgcccctggtccaggccctgaaccactgagcctactccagaaacttatcctgtggagagtgctgcgcccagagtgcctcgctggggctctggccgacttcacaacgagtctgttagggaggcccttggatgagaatacatacgcacccacaatgcccttcaagcactcccaggctacacagcctatgctgatcctcctccctcccccaggacaccccagcgccacactgcaccccctgacagtgatacagaagcttgcagccaagtatcagcagggccagaaacagttgcaggtgattgcgctgggcagtgaggcttgggaccccgtttcagtggtagtctctacactttctcaagccatgtacgaaggacactggctcgtcctggacaattgtcacctgatgccacactggcctaaggaactgctccagctcctactggaactgctcggacgcgcaaaggtcgtggccgatctcgaatccgagcagctgcttgatcagcctgagagccgaaatgtgagcaccgtccatcgggacttcaggctgtggctcattgtcccggctgaatcctctgcctctttaccggctgtgcttacgcagcactccatgccggttttctggaaccagtcactggaacttggacacgttcttatcgactcagtagaactagcacagcaggtgctttatatgcagcccccaacacaggccctgcctctgctgctactgcacggcctcctcttgcatcggcagttgtacggaacccgcttacaggctcatcggggacgttggagccaggtgactctcacccaggtactgcaaacccaggatcagctgtgggcatccctgtcaaatccccgtgctgcaatgcaggagctggctggggagaccctccctcttcctctaggagtgatttcgccccaggagtcccttgaagaaggagggggaggcatccagttcacagccttagttcttgctgtggttgagactgaagggactggcaccgaacgcctctag

SEQ ID NO: 31162 - DNA, 1488 bp, synthetic construct
  source 1..1488: mol_type = other DNA; note = Synthetic coding sequence
atggagcttcacggcggaaaccgcggagggtaccagccaaaggccttggagcaatccggctgctggctgtggcaagctgccctgagtacactgaaccctaaccctacggacagctgtcctctgtatttaaattacgccacggtggccgctctgccatgtagggtgagcagacacaatagccctagcgccgcacacttcattacgaggctcgtcaggacttgcctgcctcccggtgcacataggtgtatcgttatggtatgcgagcaacccgaggtgttcgcatccgcttgcgcgttggcacgggcttttcctcttttcacccaccgctcaggcgctagccgccgtctcgaaaagaagaccgttacagtagaattcttcctcgttggtcaggacaatgggcctgtggaggtcagtactctccagtgcctggctaatgcaaccgacggtgtgcgcctcgctgctcggatcgtcgacaccccctgtaacgagatgaacacagatacctttctggaggaaatcaacaaagtgggtaaagagctcggaatcattccaaccatcataagagatgaagaactgaagacacgcggattcggaggcatttatggcgtgggaaaagccgcactgcatcccccagcactggcagtcctgtctcatacacccgatggcgcaacccaaacgatagcctgggtagggaaaggcatcgtgtacgataccgggggactgtccattaagggcaaaactactatgccgggtatgaagagggactgcggcggagcagccgcagtgctgggggcattcagggccgcaattaaacaaggatttaaggataatttgcacgccgtcttttgtcttgcagagaactctgtcggccctaatgcaacccgacccgacgacatccacttactctatagcggcaagaccgtggagatcaataacaccgatgccgaaggcaggctagtactggctgacggtgtctcctacgcctgtaaggacctgggcgcagatatcattctcgacatggcaacgttgactggcgctcagggcatagccaccggcaagtatcatgccgctgtgcttactaatagtgctgaatgggaggcagcctgcgtgaaggcagggaggaagtgtggtgatttggtccaccctcttgtctactgccctgagctgcatttttccgagtttactagcgccgtggcggatatgaaaaactcagtggcggaccgggacaactctccttcatcttgcgctggcctattcatagcatcccacatcggattcgattggcccggagtttgggtccacttagacatcgccgctccggtgcatgctggcgagagggcaacaggattcggagtggccctgcttcttgccttgtttggcagagcaagcgaagaccccctccttaacttggtgtcccctttgggatgcgaggtggacgtagaggagggcgatctcggaagagactccaaacgacgcaggctggtctag

SEQ ID NO: 31163 - DNA, 618 bp, synthetic construct
  source 1..618: mol_type = other DNA; note = Synthetic coding sequence
atggagacagatctcaacagtcaggatcgcaaagatctcgacaagtttattaaatttttcgccctgaaaaccgtgcaggtaattgtgcaggctagactgggagagaagatctgcacgaggagcagctcatctccaaccggctcagactggtttaatctggccataaaagacattccagaagtgacccatgaggctaaaaaggcacttgctggccagctgcccgctgtaggtcgctcaatgtgcgttgagattagtttgaagactagcgagggagactcaatggagcttgagatttggtgtttggaaatgaatgagaaatgcgataaagaaattaaggtgtcgtacaccgtgtacaatagactatccttactgctcaagtccctactggcgatcactcgggtgaccccggcttacagactgtcacgaaagcagggacacgaatacgttattctctatagaatctattttggcgaagtgcagctttctggtttaggcgaggggtttcagaccgtgcgagtgggaaccgtgggtacaccagtcgggaccattactctttcttgtgcctaccggatcaatctggctttcatgagtacacggcagttcgagcgaaccccctag

SEQ ID NO: 31164 - DNA, 117 bp, synthetic construct
  source 1..117: mol_type = other DNA; note = Synthetic coding sequence
atggctgcatttaaattagattttctaccagagatgatggtggaccactgctctctgaactcttcccccgtctctaagaaaatgaatgggactcttgaccacccagatcaaccgtag

SEQ ID NO: 31165 - DNA, 1554 bp, synthetic construct
  source 1..1554: mol_type = other DNA; note = Synthetic coding sequence
atggagacggatttaaatagccaggacagaaaagacctggataaattcataaaattttttgccctgaaaaccgtgcaggtcatcgtacaggcccgactaggcgagaagatctgcacacgctcatcctcatcacctactggctctgattggttcaatctcgccattaaggacatccctgaggtgacacacgaggctaagaaagccttggcaggacagttgcccgcagtgggaagaagtatgtgtgtcgagatttccttgaaaacatccgaaggtgacagtatggagttagagatatggtgtctcgaaatgaatgagaaatgcgacaaggagataaaggtgtcttacaccgtgtataatagattgtcattgctgctgaaaagtcttttagctatcacccgagtgacgccagcatatcggctgtctcggaaacagggccacgagtatgtgattctgtacaggatctacttcggggaggtgcagttgtctgggctgggagagggattccagactgtgcgcgtcggcaccgtgggtacaccagtggggacaataacactgtcatgtgcttatcggattaacttggcattcatgtccacacgtcagtttgagaggactccaccaattatgggcattattatcgaccatttcgtggatcggccttatccatctagcagtcccatgcatccatgcaactaccggacagctggcgaagacacaggcgtcatataccccagcgtggaagacagtcaggaggtgtgtacaactagctttagtacttcacctccttcccaactctcgagcagtagattatcctaccagccagcggctctcggggtgggaagtgccgatctggcttatcccgtggtgtttgcagccggactgaacgccacccatcctcaccagctgatggtgcctggaaaagaaggtggagtacccttggcgcctaaccagcccgtgcatggcactcaagccgaccaagagagattggccacctgcacacccagcgatcgcacgcactgcgcagctacccctagttccagtgaagataccgagactgtgtcaaactcctcagagggccgagcaagtccccacgatgtcttagagactatcttcgtgaggaaagttggcgcttttgtaaacaaaccgataaaccaggttacactgactagcctggacataccattcgccatgtttgcaccgaagaacttagaactggaagataccgaccccatggtgaaccctccagattccccagaaacagagtcccccctccaaggatctttgcactcagatggttcatcgggaggctcttccggcaacacccatgatgattttgttatgatcgactttaagcctgctttttcaaaagatgatatcctgcccatggacctggggactttttaccgagagttccagaatccgcctcagctctccagcttgtccatagatatcggagctcagagcatggccgaggaccttgattctctgcctgagaagctggctgttcatgagaagaacgtcagggagttcgacgcgtttgtggagaccctgcagtag

SEQ ID NO: 31166 - DNA, 768 bp, synthetic construct
  source 1..768: mol_type = other DNA; note = Synthetic coding sequence
atggagaggagcggacaacgagtgaccacctgggattgtgaccagggcaaacattccgactctgcacagaagaatgagcgcgagtcgatcaggcagaaactggctttaggaagcttcttcgatgacggccctggcatttatacatcttgctcaaagagtggaaagccaagcttatccagccgattgcagtctggcatgaaccttcaaatttgcttcgttaacgattcagggagcgataaggacagcgacgccgacgactcaaagactgagacgagcctcgacacacctctaagcccaatgtccaaacaatctagctcctattcagatcgggataccacagaagaagaatcagagtctctggatgacatggactttctgacccgacagaaaaagttacaggctgaggctaagatggccctggctatggctaaacccatggccaagatgcaggtggaagtagagaagcagaacaggaagaagtctcctgtagccgacctccttccacatatgccacacatatccgaatgcttaatgaaaagatcgttgaagccaacagacctgcgggatatgacgattggacagcttcaggtgattgtcaacgatcttcacagtcagatcgagtcattaaacgaagaactcgttcagctgttactgattcgcgacgagcttcacaccgagcaggacgcaatgctggtcgacatcgaagacctgactagacacgccgaatcacaacagaagcacatggctgaaaagatgcccgcaaaatag

SEQ ID NO: 31167 - DNA, 78 bp, synthetic construct
  source 1..78: mol_type = other DNA; note = Synthetic coding sequence
atgtcccagagcggtgccgtctcgtgctgcccaggcgcaaccaacggatctcttgggcgtagcgacggcgtggcctag

SEQ ID NO: 31168 - DNA, 360 bp, synthetic construct
  source 1..360: mol_type = other DNA; note = Synthetic coding sequence
atggtccttgagggtaaccccgaagttggctctcctaggacatcagacctgcagcatagggggaataaaggcagttgcgttctttcttctcctggagaggacgcccagcctggggaggaacccataaagtatggagaactgatagtcctgggatgctgtgaggagggtggtgaggagacagaggcccagagaggcgaagtgaccggcccaagagcacactcctgttataatggctgcctggccagcggagataaagggaggagacgaagtcgactcgcactcagcaggcgatcacatgctaacggagttaagcccgatgtcatgcatcacatttcaacaccattggtcagtaaggcctag

SEQ ID NO: 31169 - DNA, 348 bp, synthetic construct
  source 1..348: mol_type = other DNA; note = Synthetic coding sequence
atggcgggaaggcctctaagaatcggtgaccagttagtgttggaggaggactacgatgagacttacatcccaagtgagcaggagattctcgagttcgcccgtgaaatcggaatcgaccccatcaaagagccggagctcatgtggctcgcgagggaaggcattgtggcgcctctccccggtgagtggaaaccttgccaggatatcacgggcgatatctactactttaattttgcaaatggtcagagtatgtgggatcacccttgtgacgagcactatcgatcgctcgtcatccaggaaagggcaaaactcagtacatccggagctatcaagaagaagaaaaaaaaatag

SEQ ID NO: 31170 - DNA, 471 bp, synthetic construct
  source 1..471: mol_type = other DNA; note = Synthetic coding sequence
atgtcttccgtgcaaagtcagcaagagcagctgtctcagtcggatccttccccatcacccaactcttgctctagttttgaactgattgacatggacgctggttcgctgtacgaaccagtgagccctcactggttctattgtaagatcattgacagtaaagaaacatggatcccatttaactcagaagacagccagcagctggaggaagcatacagcagcggtaaagggtgcaatggtcgggttgtgcccaccgacggcggacgttatgatgttcatctcggcgagagaatgcgttatgccgtttactgggacgagctggcaagtgaggtgcggagatgtacatggttttataagggcgacaaagacaacaagtatgtaccctactccgagagtttcagtcaagtcctggaagagacttacatgctcgcagtgactttggacgaatggaagaagaagctggagagcccttag

SEQ ID NO: 31171 - DNA, 14262 bp, synthetic construct
  source 1..14262: mol_type = other DNA; note = Synthetic coding sequence
atggtgcctgaagagcgtagagtaggcctgtcttcagatgagacgtcttccgactccttaaagtcatggcactctatttgcgttctcgacagcaaggaacagcctttagcatgccagcagaaacagcgtcagtttgtaaaacctgtgacagagtccgagcagcctaccgtattagagttattactggcggaacttaggacactcttcagcgcagtgttgcaggacagctcccccgcagcctggcgctacctgcatgcggtactcggacttttgccaccatatcgggaactgctggtggggcacttagatctactgccttttctcgagcaactctattgttgggccccttgggtccagactcaccttcatctggacctgttgggggcaattgtccaagcctttcctcctgatagctcattgctggatagtgccagtcacgctgattgttgcccacagaaacgccgacttcaccacaggcccccatgccccgcttgcccctttgtccaggcccagtggagccgtcagcaagtaaaagaggaactggctacctggctcaggccccttactttaccagagctgcagcgctgtcttggcattgtcggcgcacaggtcgctctcgaagaggcagtttggctggatggccttagccttctgccactcgccctggcagccgacattcccgtccgctacgaatcatccgatacagataacgctgaggtagagcctgtcggacgcaaggagacacgttcccagttggattacgaggtgccaagggagaaagctttccagaaaagcagcaccggtttcagtccagaaaccagttttttggactcacaggtgatgaccgctcttaagatggagcggtacttgaaaaagattcactttttgtatcttaatgtcgctccatcccgttacttccggccttatagcctgatggtggtaccacccgacaaagtgaatcctgaacattatattttctctccttttggcatcctacacgtgcatcctgttgaggggtctgaaacgatgaccttgggcacatggcaccaccattgtgtgctgtggcagcaactacaatttatccccttttttaagtattgcttgttacggaagtcgtttacctgctggaaaaagaatgtacgtctccagggcctgcaccgcctgcagaagtttctcgagaaccacttactgttagccgtgccacactttggcgcagggttgttgcatatctctcgacttctacaggaactgcattctgtttcctggcttccacaggaactcgatcggtgctacgagctactggatctgcagactgccctagcagaggagaagcataaagcactgcgcctgcttcacagatgcctgaacctgtgcacatcaatactacggctcgtccacgaagacacctaccacatgcagcagtgcctacaggaacgagtgcaaaactgcgaccgcatcagaaccggccagggatccatttatttgcagcgagtgcagcataagcagctggagcaaaaacttaagcaggccgaagcatggtggctccagctgggcaagttcgcgagacttgtggattacatgatctgccagtctctaatcagcgtcttggaagagcagatcaccagtttcgtggcgaacattctccaagctcctaggcaaaagccttttctgtcctcccagctggtatttgatgatcacgggcagctttctcacgtgccttgcgtcgaaaatatgatccagaccttgactggagggttgcagtctgtcaagacatcagcattgcaggtggttcaatccgctgacctcaagaccagttccgactccttgtattcggaagaggaggacgaggaagaagacagcaaagacgagtttctgatgcccaagtttcagggccaaccttcggacgctgttagtattttctgtggcccaaatgtgggcttagtgtggccttggaaatcacatcctattgcaggaattctcgaggtccgtggctgtagacttaggggccaatattttccgcacaattataaacagctcgaagaggacctagacaataaccctaagattcagcaggcattaaacatacagcaagtcctgctggagggcgtactgtgcaaggtgcaggagttttgtcgcgagcatcattggattacaggcatttatgagtttttacagtcgtggggcccacaaaagcttgaagatatgcgcggaggcccaataaagaactacgtgaccctcgtgtcgcgtctcaatgtgtggcaagcccgagtgtctagtatgcctatcgagttactaacaaaaggcggtttgctccttctgtcatgtcacgacgtccaggcagaaatggaatccaagctgaattcaatacggaaagacattctggcccacgttcagaatgagtgttggaatttaagccagcaactaatgacagaactgacagatttcatgcacatttttcgaacgataaattcagatattcacgcaatcgcgcagtgcacccagaaattgaacgaagccaatgagcagtatgtggagctggaagagcggatggaatacgttcgtgcgctccacgagctgattcgcaatcacttctctctgttctccgcagagaacgaagccttggatattagcgtgaggaggcagtttggagagtcacctattccaccctgccccccaccaccccagcctcacctcctacactgtcccctgctcgccccacaattactggatatgtgggaagccttccagtttgagaagagccaagcttcagagtttctgctgagtaaacgtcacgctatcatgccaaagctgcagcagctgatggctgccgctcttgctgaactggaaggcctcctggccaaggccctgtccggacctttcatggatccaacccaggaccagcgcagcactgaacaccagctcgtgtcccttgagcgccagttccagaatacggtctctgacctgagcgaactgcatcacgcctacgcgattttcaccgaggacgagacacctgtccctctccctatttgtggtaccaggccaatcgtacagcagcagaggatatggcacctgtaccgcgtcataagtgagaatatctccgaatggaagtgcatggccttcgcgaaattttccccagccatggcccaagagaagacagaaggctggctcaccgaggcagccaggatgtcaaccaccctcgaactccactccccagtgctgcagcattgtatgcggatcctgggtgagttccggtcctatctcccgctcttaactaaactaggcagtctgcaccctcaatctctaaattgtcagtgcctactgcgggcacttggcctggggtccttgcaaacaatcgagctgctgactttaggacaattgctaacatatccgctgttggaatttgcagaccgaattaatcaagtttggcaaaacgaaaacgagcgtatccacgctcaggagactatcaggagattgcagaggtattgggaggctagacaactgagactgctgaacttcatactgcatgtgccatatgagccccctgcttcagaaagatccaagagacaggtattgagaagcccgcagtgggaggttgtggacaaggactccggcacgttcattctgtctgattattctaatcttcaggattctatccaggagagcctgcaggttctaagcaagattttggccattgaaaaaagcggcgatcttaacaagatagctcttgaatgggtggcaattatgcacggactaggagcgcttttggaagtgtggttaacatttcaacaaaagtggatcttcctgaataaggtcctgcatgagatgaagatccagtttccaaacgccgatctcaattctcgtttcaaggtgatggacgaccagtaccgcacacttatgcggatttctgtggccgatccaatggtgctgtccttggtagtaccgtccgccgaaaggagcccttacttccaggggcagcagttacaacagctgctccaggccggttccgttgagctcgagggaataattatgtcactggagtctgtgctgtacggcgtgtgtgcgcatttccccagactgttttttctatccgacagcgagctcgtcgcactgcttgctgcacgcttggaatcgtgtgaggcgcagctctgggttagaaggtgttttccacacgtccacgctgtttcctttcggagctgtcccaccggagagaagaacacagatgattgggagtccagcccgaacacccagactcaagtcgaggcactggctgtgctgggtgccggtggcgaagaggtgaaactccagggtcccctaccactgcatcctgacctccccaagtggcttgcgtccctggaaaagtgcttgaggttggctctggtccacatgttgcagggatgcgtcgctgctcggctggcgagaggtccctcactcggggaggcgctaaagcagttgccgaaacagaacaagttatacctccaactctacgtgcagcactggatcgacctcgtgcaagcctttccgtggcagtgcgtccttgtggctgaagaagtcgtgtggagggccgaaatggaggaagcacttctggagtgggggacactcgccatggtctccatgcacatgcgaaaacttgaagtgttggtcaactttatgagagcacagagagcgagccagggcggtcagtcactgccatctgttcggcaaactagcctgttgtcagccctgttggtaatggccgtgacacatagagacatcgcccagttgctggaacagcaccaggtgtcagacctgaccgatttccactgggttcggcagctaaagtaccacctaggcagtcctcacatcattccgaagtcacctctccagtcactgaaaaccatcgctagtagtgagccatctctgagcccagcggcatgttggattgatgtcctcggtcgatccttcctgtacaactatgaatatctcggcccaaggcttggccctctgccctccctgcttcccgagaggccagcattggtgctccttctagctctggaggaggttgcttgcggaacggtgttggggcctaacggcgtcggcaaacgggcaatcgtcaatagcctagctcaggccctggggaggcagttagtcatgctcccgtgctctcctcagatcgaggcccaatgtttaagcaattaccttaacggcgctttacaggggggtgcttggctcctgttagagaaggtgcatcagctgccgcctgggttattgtctgctctcgggcagaggctgggggagctgcatcacctttatgccccactgtatcaagaagccagtcggaacacttcaacgatcgatccaactcagccccagcttctgggctcgtcattcttcgaaaaacaccacgtaagtgtgaggctgggatacggctgtttgcttgtgctccgagccctatccagtgctgtgcccgcaaatttgcacctgttgctacgtcccgttgccttagcactccctgaccttagacaggtcgccgaattaacccttctcggagctggcatgcgtgacgcctttcaaatggctaccaggttgtctaagttcttctctcttgaaagagagctagtgtccggacccttaccttgcaggctcccactccttaaacagattcttgaggatactatcagaactctcaatgttacaaaggaggaaccaaagtgtcagaagcctaggtcactggccgctatagaggaggcagctctgctgcggagccctctgttcagcatcctcaatgggctgcacctgcacaatttgcgagggctgctctgcgcgctcttcccatcagctagccaggtactcgcagagcccatgacgtacaaactgatgaaacccctggtcgttgaagagctgcagcaggtaggcctcgatccctctcctgacattctgggttctctcgaacagctgtcccaggctctgtctcgggcttctggaatattacttctggggccagcgggatccggtaaaacaacctgctggcacagcctgttcaaaattcagaatcggttggccgcaatggaggacaccagcacccagggatgtcagcctgtcgaaatcactcacctctacccctccggcctgtccccacaggagttccttgggtggctggaaggaagctgctggcaccatggaatttttccaaaggtactgcgagccgctggtcaatgtaataacatgggccaaaaacgccaaacagaggagagcatcggcatccaacattggatcatctgcgacggcgcttccaatggcgcttggctggactcaatcacctgtcttctcagcgagcttcctcaactaagtttaccttctggccagcaaatagcccgaccccctggaacatttctcctgatggaggttgccgatactaccgggatctcaccgaccgtggtagggtgttgcgctttggtctggtgcggtggcgagcaaacatggcaatgcattctatcagctcttatggcatcactgccttacgaatatagactgcagcacaggaccgttgccgaactgaatcacatggccgaagtgctcgtgcctgcaaccctgagattcctgacctgccaaggcgtgtcatctcttctgcaggtccatggtcagcaggcagtgtgcgcaggtgtggctgaggttaccagtatggccagaattctgcactccttgttggacttgcacctgaggctcaaggaagaaaaggccccaggccctgaagacctcagctactccgaccccgttgcccagtcattccggtcgagcaaatctagttttctcaaccggtctcaggtggacagcgatgacgtgccagataagtgtcgcgagcatctcttggctgttagttctttcttgttcgctttaatttggggcttcggtgcccatttgccatctaggttttggcccatcttcgataccttcattcgagatagcataagccgcctgtctaattaccctgagccccctccctcagctctggtttttgacttacatgtgtcccctgaggatgggaccttggtacccttcaccggccagtacttaagctctcatatcaaggggaccttgggaacctttcacccaagtatacagactgaacgcctgctgtatgtcgtcgatctgctcctaagtggtggacagcccgttcttctcgcaggagaggcggctacgggaaaaagtgccttcgtggaagtcctggtcgagccccaccacccatatatctatagccctatccacccagcctttagcagctcgcacctgagactgcttctgtcaagaggcattcagggtcagacccaagcatcccctcagcctggacatcaccaagactctaaaccatcacttctgttcttgctcgaagatctgcacctggccacgtccgatcccgagaagtcctgccaacccgtgctggagacgctcaggcaggcaatggatgggaccgtctacgcacacagcaccttggagttacagaccctgcagcctaccgtaaatttcctggctactgttacagtcccagggtattgtgagaggccattatgtcccaggctgtttcgccttttcacggtactggcactggagtccatgactcaagccacactcttggagcgccacgtcccgattatacaggcgtggctggagagatttccctcggtggagcgggagcgagccctggctcgcggtttagttagggcaagtgtcgaggcatgggaagcggtttgcaactgctttatgcccagccccttgcatccacactaccatttctctttacatagcgtttctcacctgctgagctccctccagctgttgccgaacagaaccggctcgagggggttcgtggactacccaaaccaccaggagcacctcagaagagtgtctggcttgagaggaacatgtctaaccgttatgatggccacacggaacgtggtccggctttggctgcacgaagcccagaggactttctgtgaccggctcgactctcctagggaaaggtcctactgcgccaagttgctgttggtggtggcgcagtctgtcttttgttgtggtcccggaccgcagcatctcggcaaagatcaccaggagtccgaagaggaggaggaagaggagcgggtacctgaggtagaatcggagggagaactggcacagtgggaagacttctcgaacagtaacagcgagacagaagaggaagaagagccctacgggctgcaggtggctagggtatcgaattcacgagaccctagcttaacacccagtattggacctgtcagtagaggcatgaaggagtccatttcacataaaatacggcaggagaagggtacacgcgcttctaactatcggctgcaggtgcgccgttcctttaaaacatggtggcaaaaaaaacctcaaatggacctgatcagtcccctgctgttacccgtgctgctgctgcacccacaagagaagccaagtgacctggttttctcacaggagctcattctgggacctaattcagagacgccgaatctctatttggaaagacagtgggaaaaattggaggaacagctggctaccagtgccgcacaactcaaactttccccccacctggccaggtgtcattctatggcacagcatgtcgctaggttagtcagagttctggccaggccacgccagcatggactgcttctgtctggcgctctgggcactggaagacacactgccataaccctcgcatcaagcatttgtcaggctcacttctttcatttgcctagtggttctgaggaggcaatcctacagtgtcttcgcgacgcatcctggcacgcaggaatgctgtcacaacctgtagctctactcgttccttcaggagttgatctaaccactctacatcgcctgctggcactggccacgagcggcagtttccctgggcagtacaccgaggctgatttagaccggattggcgaacacctccctagagaaaacctcggagtgaagcagaacatcaagaaagagatggtactgcagagattccatcagcaggtctgcagccatcttcacctctttttcctgattggcgacaaacaggctcacaagcagctacccagcaccctcttcctccgactcctgcagttggccacagcttcaatcgacagatatgagccttgggaccaggctgccctggccaaagtggcccagcaccacctcgagggggctcaatcagtacccctggacgatggtagttggaagtaccctgatctccaggcctctatccctagcgtcgccaaagcaatggcacttatccatctgtcagctacccattaccatgaacacctgtgcccggcactcccactagtcacccccaagaccttcctcgacttcctggacacttttctcatgctccagcagcaaaccattctgaagatcaagaacaaggcccagcgcgtgcagaacgcactggagaacctgcgaatgttgatcaaagagcacggaacccacgcaaatctaatcttcgacctggaacagcaactgaaggacagcggaaagtctttatcaatgttccagcagcaacttgaacagtccaagctcctctacaaacaacagttggaggagtgcagacatcaggagaatctgatcgagaatctggctagacagcgagacgccctccaagctcaaagagaagcatttctcgaacagatgagcaaggcttttctggagcccctgtctcaactgcaggtcgcagacttcgaagaaatccgcagctaccgggctcctcctgaatcagtggttcgggtcactgatgccatgtgcgacctgttccaccacgaaaccggctgggcttcagcgaaacagctcctgtgtaccgaagatttctaccaggaactggtcttcttccccaaagagaaaattacagactccgaacttattaaacttcacctcatcctgaaggcgcctggaatggatgacgctgctctgcgggctgtgagccgtcccgctgctagtctcgccgcttggctgtgggcagtgcttcactacggtctggctcactgtcgcggtctgcctaccgatctgctcctccaacaggtcgaggcgacattgacgcgcgaacaggctaggctgggatattaccaattccaggcccaggaaacattggagcacaatctggccttggcgaagatggtagaggacgcacaggcctcacataactgcgtggccaagactttgtcccaagctcagtgtggacagtatcacaaatggcctatgaaggctgctctgctgacccctatgagggcatggactacacagctgcagaaactgaaggggagatgcatgaccgttttcggagacacactgctgtgtagcgcagcgattatctacctaggacctttcccacctctgcgtcgtcaagagctgctcgatgagtggctcgctctgtgccgtgggtttcaagaggctctcggccctgacgacgtggctcaggccttgaaacgcaagcagaagtccgtctcaataccccctaaaaatcctctgctggcaacgcatagtcctttcagcattctctcactcctttcatcggaatctgagcagtatcagtgggatgggaatctcaaacctcaggccaagtccgctcaccttgcgggactgctgctacgtagtccaacccattacagcagctgccgatggcctctgttactggatcctagcaatgaagctctgatttggctcgatccactgccactggaggagaatagaagctttgctccagcacttacagaaggtcggggaaaaggccttatgcgaaatcaaaaacgtgagtcaaagacagacatgaaagaggaagatgacgaatcagaggagtccaatgaggccgaagatcaaacgaaagagcaaaaagctgaggagagaaaaaatgaacaggagaaggagcaggaggagaatgaagaaaaggaggaagagaagacagagtcccagggatctaaacctgcctacgagacacagctgcctagcctgccgtatctgtctgtacttagcggggctgaccccgaactgggatcccagctacaagaggctgcggcatgtggccttccagtgctattgacaaacgtggaactgggactcggatgtgaagaactgcaatggctcctccagcgggagcaactctccccgcctcaggtccagccaggcttttgcttgtacctctctacaaccctgagcctatgtgcaatggaaaaggtcctcggatgcgagctcctgaagggcctcaatgttctggaccttgggttgaatatggagatcctggaagaacagatgcttcacgaaatactgtgtagagaatatcctgagttggagacacgttggcaggatcttaaaattcgagcgctggacacctgtaaagctgtagaagccgctgaagaaagactgctgacaatgctgctgtttcagaatccaaagcggcagaagccagccaaatttctgagaaatatagttcgcgctcagggtaaactttgtcagttacgggcacattgcgaggagctcgaggggcagaagctacaggagatggttctctgggccccttaccggccagtagtgtggcacggtatggcaatggtgaaggcactctctcaacttcagaatctgctgcccctcttctgcatgagtcccgagaattggctcgccgtgacaaaacaggcactggattcaatgaagccccgtgaaattaaccatggtgaggacttggcatcccacctgctccagctgcgggctcacctaacccgacagctgcttggatctaccgtaaccgccttgggtctaactcaagtgcctctagtgggcgcactcggcgcactagcacttctgcaggcaacaggcaaagctagtgagctcgagcggctggctttatggccaggactggccgcttccccgtctaccgtacattcaaagccagtgtctgatgtggcccgtccagcctggttaggaccaaaagcctggcacgagtgtgaaatgctggaactacttcctccctttgtcggtctgtgcgctagcctcgcgggacactcctctgcctggcaggcctatctaagccttagctcaaccgttcttgggcctgccccagggcctgggccagaaccactgagtcttctgcaaaaacttattctctggcgcgtactcaggccggaatgtttggccggagccctcgccgacttcacaacctcactacttggtaggcccctggacgagaatacctacgcccctaccatgccttttaaacactcccaggccactcaaccgatgttaatcttgttgcctccgccagggcatccttcggccaccctgcaccctctgaccgtaatccaaaaattagcagccaaatatcagcaaggccaaaagcagctccaagtgatcgctttagggtctgaagcctgggatccagtgtcagtggttgtatcaacgctttcccaggctatgtatgaggggcattggttggtgcttgacaattgtcatctcatgccgcactggccaaaagagttgttgcagctgttactcgagctcctggggcgagctaaagtggtggccgatctcgaatccgagcagctgttagaccagccagagtctcgaaatgtgtcaacagtccatcgcgatttccgtctatggctaattgtcccagccgagagcagcgcttctttgccagctgtgctcactcagcacagtatgcccgtgttctggaaccaatcactggagctgggtcatgttctcatagactccgtcgagctggcccagcaggtcctgtatatgcagccacccacccaagccctgcccctgctgctgcttcacgggttgttactacaccgccagttgtacggcacacgcctgcaggcccaccggggaagatggagtcaagtgacactgacccaggtactgcagacacaggatcagttgtgggccagtctgtccaacccaagggccgctatgcaggaactggccgcatccgtgttttatgggggacctctgggggatactgaggatagagaagccctcatttccctgacgcaagcctgtctctcccctagttccggatcatgggtgcaaccacataccccacaaagcctgctggccacactgatgccgttgcccgaacttcgggagctcgacgccatggcagagtgcaaggcccaaatgcatttgttgccgagccccccagaacccaggctctgcggtttatccgagggccctcaggcttggctgttgaggagacaaagcagggccttgctgagtgctcttcagaggtcgtccccagtgtgggtcccggagtctagacggggagcccagctagccgaacgcagactgagacaaaggttggtacaagtgaatcgccgattagagagcctccaggatctcttaacacatgtgattcgtcaagatgagagcgatgctccatggagcgttctcgggcctaatgctagaagacccctagaaggggtattggagactgaggcccttgagctgtcacagctcgtcggcactctgcaaagggatctggactgtctgctccaacaactcaagggagcccctccctgcccaagccggcgatgcgcagctgtggcgcatgccctgtggactggtagactccctttaccatggagaccacatgccccagcaggaccccagccaccttggcactggctgcgacagctctcaagacgtggtcaactcctggtacggtatcttggggtcggcgctgatgcctcctccgacgtacctgaaagggtgttccacttgagtgcttttcgccacccacggaggctgttactggcgctgcgtggtgaggccgcactggatcagaatgtcccttcttctaacttcccaggcagcaggggttctgtctcatcacaactacagtataaacgattggaaatgaactccaaccctcttcatttcagagtggagaacggtccgaacccaactgtcccggagcgcggtctactactgatcgggctacaagtgctccatgctgaatgggaccccatagccggagcactgcaggatagccccagttcgcagccctctcctcttcctccagtaagcatctcaacccaggcacctggcactagcgacttacccgctcccgcagacctcaccgtttattcatgtccagtctatatgggtgggcctctcggcaccgccaagttacaaagtagaaatatcgtgatgcacctgccactacccacaaagctcaccccaaacacttgcgttcaaagacgagtgcatgtgtgcagcccacccctaagctaa

SEQ ID NO: 31172 - DNA, 390 bp, synthetic construct
  source 1..390: mol_type = other DNA; note = Synthetic coding sequence
atggtagccatggccgaagccgaagccggagtggccgtggaagtacgcggtttgcctccagctgtgcccgacgaactgctgactctctattttgaaaacaggagacggagcgggggaggacctgtgctgtcctggcagcgtcttggctgtggcggagtgctgacgttccgggaacctgcagatgcagaacgggtcctcgcccaggccgaccacgaactccatggcgctcaactatctctgcggcctgcaccccctcgggctcctgctagactgctgttacagggtttacccccagggacaacacctcagaggcttgagcagcatgtccaagcgctgcttagagcaagcggacttcctgtgcagccctgctgcgcgcttgcctctccctag

SEQ ID NO: 31173 - DNA, 867 bp, synthetic construct
  source 1..867: mol_type = other DNA; note = Synthetic coding sequence
atggaacgtgaaccttcggccagcgaggccgcacccgctgccgctgctctgtttgcttggggagctaattcttacggtcagctgggactgggtcacaaggaggatgtgttgttaccccaacagctgaacgacttctgtaaaccacggtcggttcggaggataaccggcggtggcggacacagcgccgtagtgacagatggaggggacctcttcgtgtgcgggctgaacaaggatggccagcttggcctaggtcacaccgaagacattccttatttcactccttgtaagtcgttatttggctgccccatacaacaggtcgcctgcgggtgggacttcacgatcatgctgaccgaaaatgggcaggttctaagctgcggaagtaacagttttggtcagctgggcgtcccacacggccctaggcgctgtgtggttccccaagctatcgaactgcataaggagaaagtggtttgcattgccgcaggtctgagacacgctgtcgcggctaccgcgagtgggatcgtgttccagtggggcactggactggctagttgcggccgaagactttgtcctgggcagaccttgcctcttttctttaccgccaaagaaccatcaagagtaaccgggttggagaacagcaaggccatgtgcgtcctagcaggcagcgatcatagtgcgagtcttaccgacgccggagaggtatacgtctgggggagcaacaaacatggacaactggccaacgaggctgcctttctgccagtgcctcagaaaatcgaagcccactgcttccagaatgagaaagtcaccgccatctggtctgggtggactcaccttgtggctcagacaggactcctatggttaagggcctag

SEQ ID NO: 31174 - DNA, 372 bp, synthetic construct
  source 1..372: mol_type = other DNA; note = Synthetic coding sequence
atgaacagaaggcgtaaatttctgttggcttccgttctcgctctgcagaattcatcctttatataccctagctgtcagaagtgcttttcacgcattatcctagtgagcaaaagaagcaactgccccaaatgcggttcaaccggagaatccgggaatgctaactatagatacaagctgtcactgaaggtcgctgaatccaataaattgtttgttattactgtctttggctcctgcctggacacatttttcggtctaactgctacaggactgcataggtatatccaggaccctaataagattccagagaccctcgataacgacaccactcagaaccttttgaccaaagcggtagagacatgctttgtgggatag

SEQ ID NO: 31175 - DNA, 324 bp, synthetic construct
  source 1..324: mol_type = other DNA; note = Synthetic coding sequence
atgcttaggttgtatcccggaccaatggtgacagaagctgaagggaaggggggtcccgagatggcatcattaagttcaagcgtcgttcccgttagctttattagcactcttcgcgagtcagttcttgatccaggcgtgggcggtgaaggtgctagcgataaacaaagaagcaaactgtcactgagccactcaatgattcctgccgctaaaatacatactgagttgtgcttgccggcttttttctccccagctggcacacaacgacgctttcaacagcctcagcaccacctgaccctgtcaatcatccacacggctgcccgttag

SEQ ID NO: 31176 - DNA, 1653 bp, synthetic construct
  source 1..1653: mol_type = other DNA; note = Synthetic coding sequence
atggagaccgatctcaactctcaggatcgcaaagacctggacaagttcataaagttcttcgctttgaaaactgtccaggtgatcgtacaggccaggttgggcgaaaagatctgtacccggtcctcgagcagtcctaccggatctgactggtttaacctggcgattaaagacattcccgaggtgacacacgaagcaaagaaggcactggccggacaacttccggcagttggaagaagtatgtgcgtggagatttctctgaagacttcggaaggtgactctatggagctagagatatggtgtttggaaatgaacgagaaatgtgacaaagagattaaggtgagttacaccgtgtacaatagattatccctgcttctcaaaagcttgctcgccatcacaagggtcactcccgcataccgcttgtcccggaaacaagggcatgaatatgtaatcttgtaccggatctacttcggggaagtgcaactcagcggccttggggagggatttcaaacagtgagggtgggaacagtagggacccctgtcggaacaattaccctgtcatgcgcataccgtataaacctcgcattcatgtctaccagacaattcgagcgaaccccccctatcatgggcattattatcgatcatttcgtggatcgtccatatcccagctcaagccccatgcatccctgcaactatagaactgccggagaggatactggagtgatttaccccagcgttgaggattctcaggaagtttgcaccacatcattctctacttccccaccttcacagtgtgtgttcacggttaccaaagcccacttccagactccaacgccagtggtgacagacactctgcgggttccgatggcgggtctggccttttcccaccagttgagctcaagtcggctctcttaccaaccagccgcactgggcgtgggctccgccgatctggcctaccccgtggtgttcgcagccggacttaatgctactcatccccaccagctcatggtgcccggaaaagaaggaggggtgcctctcgcccctaaccagccagtacatgggacccaggcagaccaggagagactcgccacctgcactccctcagatagaactcactgcgccgctacaccttcatcttctgaggacacggaaactgtttcaaacagcagcgagggcagagcctcaccacatgatgtgctggagactatcttcgttcggaaggttggtgcctttgtgaataaacccatcaatcaagtcacactaacatccctcgacatcccttttgctatgttcgcaccgaaaaacctggagctagaagacacggaccctatggtgaaccctccagacagccccgagactgaatcccctctccagggaagtctgcacagcgacggcagtagcggaggatcaagcggaaacactcatgatgatttcgttatgatcgactttaaaccagcattttccaaagacgacatcctgcccatggatttaggaactttctatcgagagttccagaatcctccgcagttgagcagcctgagcattgacattggcgctcagtctatggccgaggatctggactcactccccgagaaactcgccgtccatgagaaaaacgtgcgggaattcgatgcattcgttgaaaccttacaatag

SEQ ID NO: 31177 - DNA, 4104 bp, synthetic construct
  source 1..4104: mol_type = other DNA; note = Synthetic coding sequence
atgggaaattcagactctcagtatactctccagggatccaagaaccattctaatactataacaggcgctaaacagatcccttgctcactgaagatcagaggtattcatgcgaaagaggaaaagagcctgcacgggtgggggcacgggtctaatggcgctggatataaatctcgaagtctcgccagatcctgtctgtcccactttaaatccaatcagccatatgcctcccggctcgggggacctacgtgcaaagtgtccaggggagtggcttactctactcacagaacaaatgcgccagggaaggatttccagggaataagcgcagctttcagcactgagaacggctttcactctgtgggacacgagcttgccgataaccatattacatccagggactgtaacggacatcttctgaattgttatggccgtaatgaaagtattgcatcaactccaccaggggaggataggaaatccccacgggtcctgataaagaccctgggtaaattggatggctgcctgcgggtggaattccataatggcggtaatccgagcaaagtgcctgccgaggactgcagtgagcctgtccagctgctccggtactcccccactctggcctccgagacatccccagttcctgaagctcggaggggatccagtgccgattcattgccatctcatagaccatctcccaccgactcccggctgcgcagtagcaagggatcttctctctcaagcgaatccagctggtatgactccccatggggtaacgccggtgagctgtctgaagccgaaggatcattccttgcacctggcatgcccgaccctagcttgcacgccagctttccccctggtgacgctaagaagccatttaaccaaagtagtagcctgtcttccctcagagagctttacaaagacgctaatctgggaagcctgagtccctccggtatacggctgagtgatgagtacatgggcacccacgcctccctatcgaatcgcgtgtcttttgccagcgatatcgacgtcccttcccgagtcgcccatggagacccaattcagtactcaagctttaccttgccctgccgaaaaccaaaagccttcgttgaggacactgctaagaaggacagcttaaaagctcgtatgcggcgtatatcagactggaccgggtctctgagccggaaaaagcgtaagctgcaagaaccgagatctaaggaaggcagcgactacttcgatagccgatccgacggactcaacacagatgttcagggtagctctcaggccagcgcctttttgtggtcgggaggcagcacgcagattctgtcccagcggagcgaaagcacacatgccatcgggagtgaccctcttcggcagaatatctacgagaattttatgcgagaactggaaatgagcagaactaacactgagaatatagaaacttcaaccgagacagcggaaagttcatcagagtctctgtcgtccctggaacagttggacctgctgtttgaaaaggaacagggggtggtccgcaaagctggatggctgttcttcaagcctttggttacagtgcaaaaggagagaaaactggagctggttgcgaggcgcaaatggaaacagtattgggtaacattgaaaggttgcaccctgcttttttacgagacttatgggaagaacagtatggaccaatccagcgccccacgttgcgccctgttcgctgaggactccattgtgcagtcagtaccagaacaccctaagaaggaaaacgtcttctgcttgtctaattctttcggggatgtgtatctgtttcaggctacatctcagaccgatcttgagaactgggtgactgccgtgcatagcgcctgcgcttctcttttcgccaagaaacatggcaaggaggataccctgaggttgctgaagaaccagacaaaaaatctgctgcagaaaatcgatatggacagcaagatgaaaaagatggctgaattgcaactgagcgttgtgtcagacccaaagaataggaaggcgattgaaaaccagatccagcagtgggaacagaaccttgaaaagttccatatggacctctttaggatgcgctgttatctggcctctctccagggtggggaactcccaaatcctaaatcgcttctcgccgcagctagccgccctagtaagctagccctgggcaggctgggcattctgagtgtttcgtctttccacgctctggtatgcagtcgggatgattccgcactgcggaaaagaaccttatctctaacccaacgcggacgaaacaagaaaggtatcttttcaagtcttaaggggttagatacattggctagaaaggggaaggagaagagaccctctatcactcaggtggatgaactgctacatatttacggctccaccgtggacggtgttccgagggataacgcctgggagattcaaacttacgtgcacttccaggacaaccatggagtcaccgtgggaattaagcctgagcatagagtggaggacattctgactctggcatgtaaaatgagacaactggaaccctctcattatggcctgcagctgcggaagttggtggacgataacgttgagtactgcatcccagctccctatgaatatatgcagcagcaagtgtacgatgagatagaggtttttccactgaatgtatatgacgtccaactcacaaaaactgggagcgtgtgcgattttgggtttgccgtcacagcccaggttgatgagcgacagcatctgtctcggattttcatttcagatgtccttcccgatggcttagcctacggggaaggtctgaggaaagggaacgagattatgacactcaatggggaggccgttagcgacttagaccttaagcagatggaggctctgttttctgaaaaatctgtcggtttgacattgatagcgagacctccagataccaaggccactctctgcacatcttggtccgacagcgacctgtttagcagggaccaaaagtctttactgcctccacctaatcagagccagcttctggaggagttccttgataattttaaaaagaacacagccaatgatttctcaaatgtacctgacatcactacaggcctcaagaggagtcagacagatggcacactggatcaggtgtctcacagagagaaaatggagcagaccttcaggtcggccgaacagattacagcgctgtgtaggagttttaacgactcccaggcaaacgggatggaagggccaagggaaaatcaggatccccctccaaggtctttagccaggcacttgtcagacgcagacaggttgaggaaggtgattcaggagctagttgatactgaaaaatcctatgtcaaggatcttagctgtctctttgagctgtatctggagccactgcaaaatgaaacgttcctgacacaggacgaaatggagtccctgtttgggagcctgcccgagatgctggagtttcagaaagtgttcctggagacgctcgaagacggaatttccgcttcttctgatttcaatacacttgaaacacccagccagttcagaaagcttctcttcagtctgggaggaagcttcttgtactatgcagatcactttaaactatacagcggattctgtgccaaccacataaaagtccagaaggtgctcgaaagagctaaaaccgataaggccttcaaggcttttcttgacgctcgtaaccccaccaagcaacacagcagcacccttgaatcatacctgatcaaacctgttcagcgggtgctgaagtatccactgctgctgaaagagctagtgagcctcacggaccaggagtcggaggaacattatcacttaacggaggcccttaaggccatggagaaggtggcctcccatataaacgaaatgcagaagatctacgaagactatgggacagtcttcgaccaactggtagcggagcagagcggcactgaaaaagaagttaccgaactgtctatgggcgaactcctcatgcactcaaccgtctcctggctgaatccctttctttctctgggcaaagcacgcaaagatcttgagctcaccgtattcgtgtttaaaagggctgttatcctggtgtacaaagagaactgttag

SEQ ID NO: 31178 - DNA, 45 bp, synthetic construct
  source 1..45: mol_type = other DNA; note = Synthetic coding sequence
atgaacgggacactggaccatcccgaccagccagacctcgattag

SEQ ID NO: 31179 - DNA, 519 bp, synthetic construct
  source 1..519: mol_type = other DNA; note = Synthetic coding sequence
atggttgccatggctgaagccgaagctggggttgccgtggaagtgcgcggactgcctcccgctgttcccgacgagttgttaactttgtacttcgagaacagaaggcgcagcgggggtggtcctgtgctgtcttggcagagacttggttgcggaggtgttcttaccttccgagagcctgctgacgcagagcgggtgctggctcaggctgatcatgagctgcatggcgctcagttgtctttaagaccggctcctccaagggctccagcaagacttctgctgcagggcctgcctcccggaaccactccccaacggttggagcagcacgtgcaagccctcctccgcgcaagcggacttccagtgcagccctgctgcgcccttgccagccccagacccgatcgcgctctcgttcagttgcctaaaccgttgagcgaggcggatgttcgcgtattggaggaacaggcccagaatctgggactggaaggcacactggtcagcctggctcgtgtaccacaagcttag

SEQ ID NO: 31180 - DNA, 27 bp, synthetic construct
  source 1..27: mol_type = other DNA; note = Synthetic coding sequence
atgttctggaagttcgatctccattag

SEQ ID NO: 31181 - DNA, 411 bp, synthetic construct
  source 1..411: mol_type = other DNA; note = Synthetic coding sequence
atggtggcaatggctgaggctgaagccggagtggccgttgaagtgaggggtctaccacccgcagtgccagacgaacttcttaccctgtatttcgagaatcgccgtcgctctgggggagggcctgtgttgtcctggcagaggttagggtgcgggggagtactcacattcagggaacctgccgacgccgaaagggtgcttgcacaggccgatcatgagttacacggagcacagttgagcctccgaccagcccctccccgtgcccctgcacgccttctcctgcagggcctgccccctggaacaactccccagaggctcgagcagcacgtgcaagccttgcttcgtgcgagcggtctccctgtgcagccatgttgtgctcttgcttcccccagaccagaccgggcactggtgtag

SEQ ID NO: 31182 - DNA, 5843 bp, synthetic construct
  source 1..5843: mol_type = other DNA; note = Synthetic coding sequence
ggtcgtcctattgatcctagagaggggcctgggcgaccaccgttggacggaagggatcacttcggaagaccccctgtggatatcagagagaatcttgttaggcccggaatcgaccacctgggccgtagggatcacttcggattcaaccccgaaaaaccttggggtcaccggggagattttgacgaacgcgaacaccgtgtcctgccagtgtacggagggcctaagggccttcacgaggaaaggggtcgtttccgctccgggaactatcgttttgacccacgttccgggccttggaataggggattcggccaggaggtgcaccgcgattttgatgacagaaggcggccatgggaacggcagagagaccgggatgaccgcgactttgacttttgtcgtgaaatgaatggcaataggctgggacgcgaccgaatccaaaatacttgggtccctccccctcacgcacgtgtcttcgactattttgaaggcgctacaagccagcgcaagggcgataacgtgcctcaggttaacggagagaataccgagaggcacgcacagcctcccccaattcctgtgcagaacgacccagaactgtacgagaaactgacatcctcaaatgagatcaataaggagaagtctgacaccgtcgctgatatcgagtcagagcccgtggttgagtccacggagaccgaggggacacccctcacatctctgacagccgagacacgcagacaggtcaagatgggtaacagtgactcccagtataccctgcaaggttccaaaaaccactctaatacgattaccggagctaaacagatcccttgctcccttaagatcagaggtatccatgccaaagaagaaaaatctttacacggatggggccacggcagtaatggagcgggttacaagagtcgctcccttgcacgatcatgtctgagccactttaaatccaatcaaccctacgcatctaggctgggagggcctacctgtaaagtctcccgcggtgtggcctattccacacacagaaccaacgccccagggaaagacttccagggtatttcagcagccttcagtaccgaaaacggcttccatagcgttggacacgaactggccgataatcatattaccagccgggattgtaacggccatctgttaaattgttacggcaggaacgaatctatcgcctctactcctccaggtgaagatagaaaatcgccaagagtcctgattaaaacactgggcaagctcgatggctgtttacgagtggagttccacaacggtggcaatccttcaaaagtgcccgcagaagattgctccgaacctgtgcagttgctgcggtattcccctactcttgcgtctgagacttcccccgtgcccgaggcgagacgcggaagcagcgccgattcattgccatctcatcgaccttcccctacagatagccgtttgcgaagctctaaaggctcgtcgctgagctctgagagctcttggtatgactccccatggggaaacgccggtgaattatctgaagctgagggtagctttcttgctcctggtatgccagacccaagcctgcacgcttcctttcccccaggtgatgctaaaaaacctttcaaccagtcttcttctctgagctccctgagggagctgtacaaagatgccaacttggggtctctgagcccctcgggaattaggttgtctgatgagtacatgggcacgcatgcatccttaagtaatagagtgagctttgcttctgacatcgatgtaccctcacgggttgctcatggtgatcccattcagtacagctcattcaccctcccctgccgcaagcccaaagcatttgtggaggatactgcgaagaaggattcactcaaggcgaggatgagacgtatttctgattggaccggctctctttcgaggaagaaaaggaaactccaggagccacgttcaaaggagggttctgactacttcgactctcgctccgacggcttaaatacagacgtccagggctctagccaggcaagcgccttcttatggagcggaggcagcacgcagatcttgtctcagcggtctgaatccacccacgccatcgggtccgatcctctacgccaaaatatctacgagaattttatgcgggagctggagatgtcccgcacaaacaccgagaatatagaaactagcacggagactgctgagtctagcagcgagagtctctccagtctcgagcagttggaccttctctttgagaaggaacaaggagtggtcaggaaggccggttggctctttttcaagcctttggtgaccgtgcaaaaggagagaaaactggaactggttgcgagacggaagtggaaacaatactgggttacactgaaagggtgtacactgctcttctacgagacctacggaaagaatagcatggatcaatcttcagcgccacgttgtgccctcttcgcagaggattctatcgtgcaatctgtacccgagcacccgaaaaaggagaatgtattttgtcttagcaactcctttggtgacgtttatcttttccaggccacctcacaaactgatctggagaattgggttactgccgtacactcagcctgcgcatcattgtttgccaagaaacatggcaaggaagacactttgaggttgcttaaaaatcaaactaagaacttactccagaagatcgatatggatagcaagatgaaaaaaatggccgagttgcagttatccgttgtttccgatcccaaaaaccgaaaagccatcgaaaatcagattcagcaatgggagcagaacctggagaagttccatatggacctctttcgaatgcgttgttatctggcctcactgcaaggcggagagttgccaaatccaaaatccctgctggccgcagcaagtcggccatcaaagctagccctgggacgtcttggaattctcagcgtttcaagcttccatgcacttgtctgttcccgtgacgatagcgctctccggaagagaacgctgagcctcactcagagaggtaggaacaagaaagggatatttagctcactgaagggccttgataccctagcccgaaaaggtaaggagaagagaccgtcaatcacccaagtcgacgagttgctccatatctatggtagcactgtggacggagtgcctcgcgataatgcctgggagatccaaacttacgttcattttcaagacaatcacggagttacggtcggaataaagccggagcaccgcgtagaggatattcttacgctcgcctgcaagatgaggcaacttgagccttctcactacgggctgcaattgcgtaaattagtggacgacaacgttgagtattgtataccagccccatacgaatatatgcagcagcaggtttacgacgaaatagaagtttttccactcaatgtttatgacgtgcagctgactaagacagggtcggtctgtgactttggatttgctgtgacagcacaggtcgacgaaaggcaacatctaagccgcatctttatctctgatgtgctgcctgatgggttggcctacggtgaaggcctccggaagggaaacgagattatgacactgaatggtgaggcggtctcagacctggatcttaagcagatggaggcccttttcagcgagaagagcgtcggactaaccctcattgcacgaccaccagacacaaaagcaacgttgtgcacaagctggtctgactccgatctgtttagcagagaccaaaagtctttgctgccccctccgaatcagtcccagctgctggaggagttcctggataatttcaagaagaacacagctaatgacttcagtaatgtcccagacattaccaccggtctaaaacggagccaaaccgacggaacacttgaccaagtctcacaccgggaaaaaatggagcagacctttcggagcgctgagcagatcaccgccctgtgccggagcttcaatgatagccaagcgaatggaatggaaggaccacgtgagaaccaggaccccccaccaaggtccctggcgagacacctgagtgatgcagatcggctgcgaaaagtcatccaggagctggttgacaccgaaaaatcttatgtaaaggacctgtcgtgcctgtttgagctctacctggaaccgctccagaatgaaacttttctaacacaggacgaaatggaatctttattcgggtcactacctgaaatgctagaattccagaaggtcttccttgagacattggaggatgggatctctgcttctagcgatttcaatactctggagactcctagtcagttccggaagttactattctctcttggcggatccttcttgtactacgcggaccatttcaagctgtatagcggcttttgcgctaaccatataaaagttcagaaggtgctcgaacgggctaagaccgacaaagctttcaaagcatttcttgacgcacggaaccccacaaaacagcattcctctaccctcgaatcctacctaattaaaccagtccaacgagtactcaagtatccattgttgcttaaagagctggtgagtctgacagatcaggagtcagaagaacactatcatctgaccgaagcactgaaggcgatggagaaggtagcctcccacattaacgagatgcagaagatctatgaggactatggcacggtattcgaccagttggtggccgaacagagcggcacggaaaaagaagttaccgagctgtcaatgggggaactccttatgcactcgaccgtcagctggctgaacccttttctgtcactggggaaggcacgaaaggatctcgagcttacagtgttcgtatttaagagagccgtgattttggtgtataaagagaactgcaaattgaaaaagaagctgcccagcaattctagacccgcacataactctaccgatctggacccattcaaatttcgatggctgatacccatctcagccctccaagtgcgcttgggcaatccagccggaacggagaataactcaatatgggagttgattcatacaaagagcgaaatcgaaggacggccagaaacgattttccagctgtgttgttcagattcagagtccaaaacgaacatcgtgaaggttatccggagtatccttcgggaaaattttcggaggcatattaagtgcgagcttcctctcgaaaagacctgtaaggaccgcctcgtgcccctcaaaaatcgggtgccagtgtccgccaagttggccagcagccgatccctgaaggtgctcaaaaactcatcttccaacgaatggacaggggaaaccgggaaaggcacactcttggactctgacgaggggagtctttcctcagggacacagagctccgggtgccctacagccgaaggcaggcaggactctaagagtacctctcccggaaagtacccccatcctggcctggcagattttgccgataacctaattaaagagagcgatatcctctcggatgaagacgatgaccatcggcagaccgtcaaacagggaagccccacaaaagatatagagattcagttccaaagattgcggattagcgaagatcccgacgtccacccagaggccgaacagcaacctgggccagagtcaggggaaggacaaaagggcggagagcagccaaagttggtgcgaggccacttctgccccattaaacgcaaagccaattccactaaaagagacagagggacactcctgaaagcacagattaggcaccagtcattagacagccagagtgaaaacgccacaatcgatctgaatagtgtgctggagcgagaattttccgtgcagtctcttacaagcgtagtgtctgaggagtgcttttacgagaccgaatcccatggcaaatctta

SEQ ID NO: 31183 - DNA, 294 bp, synthetic construct
  source 1..294: mol_type = other DNA; note = Synthetic coding sequence
atggaggctgccgatgcttcacgttcaaacggaagctcccccgaggccagggacgctagaagcccatccgggccatctggctcactggagaacggcactaaagccgacggtaaggacgctaagaccacaaacggccacgggggagaggccgctgagggcaagtccctaggtagcgctctcaagcctggcgagggacgatccgctctgttcgcaggcaatgagtggagaagacctattatccagtttgtcgaatcaggcgacgacaagaattcaaactacttttccatggactag

SEQ ID NO: 31184 - DNA, 117 bp, synthetic construct
  source 1..117: mol_type = other DNA; note = Synthetic coding sequence
atggaggccgctgatgcaagtaggagtaatgggtcatcaccagaggcacgagacgcccgttctccttctggtccaagcgggagcttggaaaatgggactaaggctgatggtaagtag

SEQ ID NO: 31185 - DNA, 1455 bp, synthetic construct
  source 1..1455: mol_type = other DNA; note = Synthetic coding sequence
atggccatcggaaaaaggctcgctacactccccacaaaggagcaaaagacacagagactcattagtgagcttagcttgttaaaccataaactgcccgctagagtgtggctccctactgctgggttcgaccatcatgtggtgcgagttcctcatacgcaggctgtagtccttaactctaaagataaagctccgtacctgatctatgtggaagtactagagtgcgaaaactttgatacaaccagtgtcccagccaggattccagagaatcgtatccggtccaccaggtcagttgaaaatttgcccgagtgcggaattactcatgagcagagggccggttccttttcaaccgtgccaaattatgacaatgacgatgaagcgtggagcgtcgacgatatcggagaacttcaggtggagctgccagaggtgcacactaatagctgtgacaacatcagccagttctctgttgatagcatcactagtcaggagagcaaagaaccagtctttatcgccgcaggcgacatacgacgacgcctgagcgaacaactggcccatacacccactgccttcaagagggatcctgaagacccctctgcagttgcattgaaggagccctggcaagagaaagtgcgaaggatcagggagggatccccctatggccacctccccaattggcgcctgctgagcgtgattgtcaagtgcggcgacgatctgagacaagagttactagcctttcaggtgctgaaacagttacagtccatttgggaacaagaacgtgtgccgctgtggattaagccctacaagattctcgtgatatcggccgacagcggcatgatcgaacctgtggtcaatgcggtgagtattcaccaggtgaaaaaacaaagccaactgagtctgttagattactttttacaggaacacggctcctataccacagaggcatttctatctgcgcaacgaaactttgtccagtcttgcgccggatactgtctcgtctgctacctgctgcaagtgaaggatcgacacaacgggaatattcttctggatgcagaagggcacatcatccatattgattttggatttattttgtcctcatcccccagaaatttaggctttgaaactagcgcttttaagctgacaactgagttcgtagatgtcatggggggactagacggggatatgttcaattattacaagatgctaatgctgcagggacttattgccgctcgcaagcatatggataaggtcgtccagatcgtggagattatgcagcaagggtcgcagctcccctgcttccatggaagcagtacgatcaggaacctcaaagaaaggttccacatgtctatgaccgaggagcagctgcagctcttagtggaacagatggtggatggatcgatgcgctctattaccacaaagttgtatgacggcttccagtatttaaccaatgggatcatgtag

SEQ ID NO: 31186 - DNA, 228 bp, synthetic construct
  source 1..228: mol_type = other DNA; note = Synthetic coding sequence
atggcaattccaatcacagtcttggactgcgatcttctcctctatggacggggacaccgcaccttggatagatttaaactggatgacgtaacagatgagtatctgatgtctatgtatgggttccccaggcagtttatatactacctggttgagctgctgggcgctaacttaagcaggccaacgcaaagatctcgtgccatctcccccgagacacaggtccttgcttag

SEQ ID NO: 31187 - DNA, 2754 bp, synthetic construct
  source 1..2754: mol_type = other DNA; note = Synthetic coding sequence
atggacggggcagccggaccaggggacggccctgctcgggaggcccttcaatccctgtcccagaggctgagagtccaagagcaagagatggagctggtgaaggctgcgctggctgaggctctgcggctccttcggctccaggtccccccttcttctctgcaaggctctggaacccccgctcctccgggagactccctggctgcaccgccaggccttcctcccacttgtactccatctcttgtttcacgaggcactcagactgagactgaagttgagttgaaaagtagtcccggacccccaggactgtcaaacggacctcctgctccacagggagcgagtgaagagccctccgggacccaaagcgagggaggcggatcatcgagttccggtgccggatcacctggtccccctgggatcttgcggccactgcagcccccacagcgcgcagacacacccagaaggaattcgtcctcttcttcgagcccctctgaacgcccacgtcagaaactctccaggaaggctatttcctcagctaatttgctggttagatcaggcagtactgaaagtcgcggaggaaaggaccccctatcatctccaggagggcctgggtctcggcgttcgaactataatcttgaagggatttctgtgaagatgttcctgcgaggaaggccaattaccatgtacatcccaagcggaattcgcagtttggaggagttaccctcaggcccaccaccagagacccttagcctcgattgggtctatgggtacagggggagagacagcagatccaatctgtttgtcctcagatctggcgaggtcgtgtactttattgcatgcgtcgtagtgctgtataggcctgggggaggacccggaggtccgggaggaggagggcagcgccactacagggggcacactgattgcgtcaggtgtctcgccgtccaccccgatggtgtgcgggttgctagtggccagactgccggagtggacaaagatgggaagcctttacagccggtggtacacatttgggatagtgagacacttctgaagttgcaggagatcggcctcggggcttttgagcgaggagtgggcgcattggcgttctctgctgcagaccagggagctttcctgtgtgtggttgatgacagtaacgaacatatgctgtccgtgtgggattgctccagaggcatgaaactggccgagataaagagcaccaatgatagcgtactagctgttgggtttaaccctcgcgactctagctgtattgtgacctcaggtaaatctcacgtacatttttggaactggagtgggggagttggcgtgcccggaaatggtacattgactaggaaacagggagtgtttggcaagtataagaagccgaagttcattccatgcttcgtgttcctccccgacggcgacatcttaactggcgatagtgagggcaacatcttgacatggggacgtagtcccagtgattccaagacaccagggaggggcggagctaaggaaacttacgggatcgtcgcacaagctcacgcgcatgagggtagcatctttgcgctctgcctgcgcagggacgggacagtattgtccggtgggggaagggaccgaagactggtgcaatggggccctggcctggtggccttacaggaggctgaaatcccagaacattttggggctgtgcgagcgattgctgaaggcctcggctccgaactactagtggggaccaccaagaacgccctgctgaggggggatttggctcagggtttttcccccgtgattcagggtcacactgatgagctctggggcctgtgcacacaccctagtcagaacaggtttctgacatgcggccatgaccgacagctctgtctttgggacggagaaagccatgcgcttgcctggtcgattgacctgaaggagacaggtctgtgtgcagattttcatcccagcggtgccgtcgtggcagtggggctcaacaccggcaggtggctcgtgctggacacggaaacgagggaaatcgtgtctgacgtgattgacggtaatgagcagctgtcagtggtgaggtattccccggatggcttgtacttagctattggcagccacgacaacgtaatatatatctacagcgtaagcagcgatggagcaaaatcctcacgattcgggaggtgtatgggtcactcctccttcataacgcatctggactggtctaaggacgggaattttattatgtccaattctggggattacgagattctgtattgggacgtggccggtggctgcaaacagctgaagaatcgttacgagtcccgagacagggagtgggcgacatacacatgcgtactgggctttcacgtctatgtacctgttcgctcctgtcagggcgctgagcctcacgtgagaggacccaggcaaccccgtgatcagcggccaattcatgcgcgaaggctggctccacggttggcaggtagacagggccgacaacacctcccagtggcatccgccggacgttgggggaggggagcgggtgctaggcacgctctcagtaaccccttgcctgtgccccgactcctgcctaggagactgatagcagcctggcgggaccgattggcacggagaagaggcccagcccctccatgtccttccctggcacagagccctaccactcgcggaagattgttccccggactgaccagcaggcacagccgaagccggattttcctcgagggggcaaacggggcaccagctcacactgtctag

SEQ ID NO: 31188 - DNA, 321 bp, synthetic construct
  source 1..321: mol_type = other DNA; note = Synthetic coding sequence
atggtggccatggcggaggccgaggctggcgtggccgtcgaggttcgtggcctccccccagctgtccccgacgagctactgacactatactttgagaaccggcgtagatcaggtggtggccctgttctgagttggcagaggctgggctgtggaggcgttctgacttttagggagcccgcagatgccgagcgggtgttggcacaggccgatcacgagctgcatggcgcacagctgagtctccggcctgcccctccccgagcacctgcaagacttctgcttcaaggactgccgcctggcacaactccccagcgcctagaatag

SEQ ID NO: 31189 - DNA, 228 bp, synthetic construct
  source 1..228: mol_type = other DNA; note = Synthetic coding sequence
atgttctggaagttcgatctgcattcttcatcccacatcgacactcttctagagagagaggatgtcacattgaaggagctcatggatgaagaggatgttctccaagagtgcaaggctcaaaaccggaagctaatcgaattcctgttgaaggcagaatgccttgaagatctggtcagctttatcatcgaggagcctccccaggacatggatgagaagatccgttattag

SEQ ID NO: 31190 - DNA, 1275 bp, synthetic construct
  source 1..1275: mol_type = other DNA; note = Synthetic coding sequence
atggatcagcctagtggcagatccttcatgcaggtgctctgtgagaagtactcgcctgagaacttcccttacagacggggtcccggaatgggtgttcatgttcccgcaacgccccagggttcacctatgaaggacaggctgaatctcccatccgtcctcgttcttaattcttgcggaattacatgcgcgggagacgagaaggaaatagcagccttttgtgcccatgttagtgaactagatctctccgacaacaagctggaggactggcacgaggtgtcaaagatcgtttctaacgtgccacagctggagtttcttaacctaagttcgaacccattgaaccttagcgttttggaacgaacatgcgcgggttcgttctccggagtacgcaagttggtgctgaacaactccaaggcttcttgggagaccgtccatatgatcctacaggaactgccggatttggaggagctgtttctgtgcttgaatgattacgaaactgttagttgccctagcatttgttgccactccctgaaactgcttcatattaccgataacaacctccaggactggacggaaatcagaaagctgggcgttatgttcccttctcttgacacgctcgtcctcgctaataatcatctgaacgcaatagaggagcccgacgacagccttgccagattgttcccaaatctgcgatccatcagtttacacaaatccggattacagagttgggaggatatcgataagctgaatagttttcctaagctcgaggaggtccgccttctggggatcccgctcttgcagccctacactacggaggagcggagaaaactggttattgctagactcccttctgttagcaaactgaacgggagcgtggtgacagacggcgagcgcgaagattccgagaggttcttcatcagatactacgtggacgtgcctcaagaggaagttcctttccgttaccacgagctcattactaagtatggaaagctggagcctctcgcagaggtggatctcagaccccaatcttcagccaaggtggaagtccattttaatgaccaggtggaggaaatgtcaatccgcttggaccaaactgtggccgaactgaagaagcagctgaaaaccctcgttcagcttcccacatccaacatgttgctgtattacttcgatcacgaggcccctttcgggcctgaagaaatgaaatactctagtcgagccctgcactcatttggcatacgagatggggacaagatctacgtggagtcgaaaaccaaatag

SEQ ID NO: 31191 - DNA, 288 bp, synthetic construct
  source 1..288: mol_type = other DNA; note = Synthetic coding sequence
atggaggcggcagacgcatcacgatccaacgggagctctccagaagccagggatgcgcgttctcctagtgggccatcaggatcgctggagaacggaaccaaagctgacggaaaagatgccaagacaaccaacggacacgggggtgaggctgcagagggcaagtctttaggtagcgccctgaaaccaggggaaggaagatctgccttgttcgcaggtaatgaatggcgacggccaattatccaatttgtggagagtggggatgataagaatagcaattattttagctag

SEQ ID NO: 31192 - DNA, 3144 bp, synthetic construct
  source 1..3144: mol_type = other DNA; note = Synthetic coding sequence
atggccccacgcctgcagctggagaaggccgcatggcgatgggcagaaacagttcgccctgaagaggtgagccaggagcacatcgagactgcctacaggatctggctggagccctgtatccggggtgtgtgccggaggaactgtaagggaaacccgaactgcctcgtgggaatcggcgaacatatctggctcggcgagattgatgagaattctttccacaacattgatgatccaaactgcgagcggagaaagaagaattctttcgtcgggttgacaaacctgggtgccacctgttacgtcaatacattcctccaggtgtggtttcttaatttggaactgcgccaggccctctacctctgtccgagcacctgttctgactacatgctaggggatggcattcaggaggagaaagactacgagccacagaccatttgtgagcatctgcaatacctgtttgccctgctgcagaacagcaacagaagatatattgacccgtcggggtttgtcaaagctctcggattggatactggacagcagcaggatgcacaggagttcagcaagctgttcatgagtctgctcgaggacaccttgagcaagcaaaagaatcccgacgtgcgcaacatagttcagcaacagttttgtggcgagtacgcctacgtgacagtttgcaatcagtgcgggcgagagtcaaaactgctgtctaaattctatgaactagaattgaatatacaagggcacaaacagctgaccgattgcatttcagaatttctcaaggaagagaagctggagggtgataatagatacttctgcgagaattgccagtcaaaacaaaatgctacacggaagatccgcctcctgagcttgccatgcaccttgaatctgcagctaatgcgtttcgtcttcgatagacagacgggccacaagaagaaattgaatacctatataggatttagcgaaattctggatatggaaccctacgtcgagcacaaaggagggtcttacgtctatgagctctccgctgttctgattcacaggggggtctccgcatacagcgggcattacatcgcacatgtgaaagatccgcagtccggggagtggtacaagttcaacgacgaggatatcgaaaagatggaaggaaaaaagctgcaacttggaatcgaagaggacctagaaccttcgaagagtcagacacgtaagcccaaatgcggcaaaggcactcactgctcaagaaatgcatatatgctggtataccgactgcaaacccaagaaaaacccaataccacagtccaagttcccgcattccttcaggagctggtagatcgggataactcaaaattcgaggagtggtgcattgaaatggccgaaatgcggaagcaatctgtagataagggtaaggccaaacacgaggaggtcaaagagctgtatcaacgacttccggctggggcagagccctacgagtttgtcagccttgagtggctccagaaatggctcgatgagagcaccccaaccaagcccatcgataaccacgcttgtctctgttcccacgataagctgcacccagacaaaatatccatcatgaaacgcatctctgaatacgccgctgacatattttactcccgatacgggggaggccctagacttactgtgaaagccctgtgcaaagagtgcgtcgttgaacgctgtagaatcctgcgcctcaagaatcagctcaatgaggactataagaccgttaataatctgctgaaagccgcagtgaagggttcggatggcttttgggtcggtaaatcaagtctgaggagctggaggcaactggctctagaacagctagatgagcaagacggagatgcggaacaatccaatgggaaaatgaatggttctactctcaacaaagatgagtctaaggaggagcggaaggaagaggaagagcttaactttaacgaggacattctgtgcccacatgcagtcttcttttttagtaagtacatttttctaaactccggagagttgtgcatcagcgagaacgaaagacgcctagtgtccaaggaggcatggtctaaactacagcagtacttccccaaagcacctgagtttccctcttacaaggagtgctgtagccagtgtaagatactggaacgtgagggtgaggagaatgaggctctccataaaatgatcgccaatgagcagaagacttctctgcctaatctgttccaggataagaacaggccgtgtctttctaattggcctgaggatacagatgtgctgtacattgtgtcccagttcttcgtggaggaatggcggaaattcgtgcgaaagcccacccggtgtagccccgtttcttccgtgggcaactcagcactgctctgcccccacgggggactcatgtttactttcgcatccatgacaaaagaagacagtaagctcatcgccttaatttggccaagcgagtggcaaatgatccaaaagctgtttgtggtcgatcacgttatcaagatcacaagaatcgaggtgggggacgttaatccgagcgagacgcagtacatttccgagcctaaactgtgccctgaatgccgggaaggcttgctctgccaacagcaaagggacctgcgggaatatacacaggctaccatttacgtgcataaagtggttgacaacaagaaagttatgaaggacagtgcccctgaactgaatgtgagctcatctgaaaccgaggaagacaaagaggaggccaaacctgatggggagaaagatcctgactttaatcagtctaacggcggaacaaaaaggcagaaaatctcccaccaaaactatatcgcctaccagaagcaggtcattcgccgaagcatgcgtcaccgtaaggtcaggggcgaaaaagctctgttggtaagtgccaaccagactttaaaggagctcaagattcaaattatgcatgctttttccgtggccccatttgaccagaatctgtctatcgatgggaaaattctgtcagatgactgcgctactctcggcactcttggggtcatccccgaatctgtgatattattgaaggccgacgaacctattgctgactatgcggctatggatgacgtaatgcaggtgtgtatgcctgaggagggcttcaaggggacaggcttgctgggacactag

SEQ ID NO: 31193 - DNA, 1443 bp, synthetic construct
  source 1..1443: mol_type = other DNA; note = Synthetic coding sequence
atggaaacggacttaaactcacaagacagaaaagatctggacaagtttatcaagttttttgcactgaagactgtgcaggttattgtccaggcccgacttggagaaaaaatctgcacacggagttcaagttccccaacagggagtgactggtttaacctggccatcaaagacattcccgaagtgacccatgaggctaaaaaagccctggctggacagctgccggcagtaggccgatccatgtgtgtggagatatcccttaaaacatccgagggtgactcaatggagctggagatctggtgcctggaaatgaatgagaaatgtgataaggaaatcaaggtgtcatatacagtgtacaatagactttctctgctgctaaagtcccttttagccatcacccgcgttacccctgcctataggctatcccggaaacaagggcatgaatatgtgattctgtaccgcatttacttcggagaggtccagctgtctggccttggtgaggggtttcaaacagttagagttggaacagtcgggactcccgtgggcacaatcactctcagttgtgcttacagaatcaacttagctttcatgtctactaggcaatttgagcggactccaccaatcatgggaattataatcgaccatttcgtggatagaccctatccttcctccagcccaatgcacccttgtaattacaggacagctggcgaagacactggagtaatataccccagtgtcgaagatagccaggaggtctgcacaacatctttcagtacgagtccgccttcgcagctgatggtgccaggtaaagaagggggagtgcctctggccccaaatcagcctgtccacggtacccaggcggatcaggagagactagccacctgcaccccttccgaccgcacacattgcgctgcaacaccaagctctagcgaagataccgagacagtgtctaactcttctgaaggaagggcaagtccacatgatgtgctggaaaccatcttcgtgagaaaggtgggggcttttgtgaataaaccgataaatcaagtcacactcacaagcctcgatatcccgtttgccatgttcgctccaaaaaacctcgagctggaggatacggaccctatggtgaacccacccgattctcccgaaactgagtctccgctgcagggtagtctacacagtgacggctcctcaggtggctccagtgggaacactcatgacgactttgtcatgattgattttaagcctgcgttcagcaaggatgacatcctccccatggacttagggactttttatcgagaattccaaaacccccctcaacttagcagtttgtcaatcgatatcggggcacagtcaatggcagaggatttggattccctacctgagaagctggccgtacacgagaagaatgtacgcgagttcgacgcattcgtggagacactacagtag

SEQ ID NO: 31194 - DNA, 2376 bp, synthetic construct
  source 1..2376: mol_type = other DNA; note = Synthetic coding sequence
atgttttggaaattcgatctgcactcgtcgtcacacatcgatactctgctggagagggaggacgtgacattgaaagaattgatggacgaggaagatgtgctccaagagtgcaaagctcagaacagaaaattaattgagtttctgctgaaagccgagtgtttggaggacttggttagcttcatcatcgaggagcctcctcaagacatggacgagaaaatcaggtataagtacccaaacatctcttgcgagctgttaacgagcgatgtttcacaaatgaacgatcgcctcggcgaggacgagagtcttctgatgaagctgtactcattcctgcttaacgatagtcctctaaaccctctactggcaagcttcttctccaaagttctgagtatactgatttctagaaagccagaacagattgtcgacttcttgaagaagaaacatgacttcgtggacttaatcatcaaacatattgggacgtcggcaattatggacctcctcctgaggcttctcacctgtattgaaccaccacagccgaggcaggatgtgttgaactggttgaatgaagagaagataatccagaggttggtcgagatcgtgcatccttctcaggaggaggacaggcactctaacgcatcccagtctctgtgtgaaatcgttagactgagtagggaccagatgcttcagattcagaatagtacagaaccagatccgctactggccacgttggagaagcaggaaatcatcgagcaactgctgtcaaatatcttccacaaggagaaaaatgaatccgcaattgtcagcgctatccagatactgttgacattgcttgagactcggaggcccaccttcgaagggcacattgaaatctgcccacctggcatgtctcactccgcctgcagcgtgaacaagtcagtccttgaggctattagggggcgactgggcagtttccacgagctgctgctggagcccccaaagaatatgttcttcaaatatacatggaacaatttcctgcacacccaggtggagatctgcatcgccttaatactggctagccctttcgaaaacaccgaaaacgcaaccatcaccgatcaggactcgaccggggacaacctgttgctcaaacatttgttccaaaagtgccagcttatcgagagaattctggaagcgtgggagatgaacgagaagaagcaggccgagggtggaagaaggcacggatacatgggccacctgacacgcatcgcgaactgtatcgtccacagtaccgataaaggcccaaatagcgcgctcgtccagcaactgataaaggatctccctgatgaagtcagggagcgttgggagaccttctgcacgtcatcactgggtgaaacaaacaagaggaatacagtggacctcgccttcagcgactaccagatgcagcagatgaccagcaactttatcgaccagttcggcttcaacgacgagaagttcgccgaccaggacgatataggcaatgtcagctttgaccgcgtgagcgatatcaactttaccctgaacaccaacgagagcggcaatatagctctgttcgaagcctgttgtaaggagcggatccagcagttcgatgacggaggctctgacgaagaggacatatgggaggaaaagcatatcgccttcacacccgaaagccagcgcaggtcctctagtgggagtactgactccgaagagagcacagactcagaagaagaagacggtgccaaacaggatttattcgaaccatctagcgctaacaccgaagataaaatggaagtggatttatctgaaccaccgaactggagcgccaatttcgatgtgcccatggagactacacacggagctcccctggattccgttggatccgacgtttggagtaccgaggaaccgatgccaacaaaagaaactgggtgggcctccttctcagaatttacgagttcactttccacgaaagacagcttaagaagtaactccccagtggaaatggagaccagcacagagccaatggaccctctcacaccctctgcagccgctctagctgtgcaacccgaggcagcgggaagcgtagctatggaagcttcctccgacggtgaagaggacgcagagtccacagataaagtgaccgagaccgtaatgaacgggggaatgaaggagactctgagtctcaccgtcgatgccaagaccgaaacagctgtgttcaaaagcgaggagggtaaactgtccacgagccaggacgcagcctgcaaagatgctgaggagtgtccagaaaccgccgaagcaaaatgtgcggcacccagacccccatcgtcttctcccgagcaaagcggagtggaaattcccgctctgcctgggcaatggagccagcagtag

SEQ ID NO: 31195 - DNA, 1500 bp, synthetic construct
  source 1..1500: mol_type = other DNA; note = Synthetic coding sequence
atgtttggcgatgcctcgacgagccttgtcgttcctgagaaggtaaagacacccatgaaaagctctaagacagacctacagggttcagctagccctagtaaggttgaaggagtccacacacccagacagaaaagatctactcctctgaaagaacgccagctttcaaaacccctttccgaacggaccaactcatccgactcagaacggagccccgacttaggacacagtacacagatccccaggaaagtcgtgtatgatcagctgaaccagatcctggttagcgatgcggcactccccgaaaacgttatcttagtgaatacaacagactggcaaggccagtacgttgccgaactgctgcaggatcagaggaaacctgttgtgtgtacctgcagtacggtggaggtgcaggcggtgctcagtgccctgcttacaagaatccagagatactgcaactgtaatagctccatgcccagaccagttaaagttgcagcggtcggcggtcagtcttacttatccagcattctcaggtttttcgtgaaatcgctcgccaacaagacctcggattggctaggctacatgagatttctcataatacctctcggttctcatcccgtggccaagtatcttggtagcgtggatagcaaatattcttcatccttcctggactccggctggcgggaccttttcagtagaagcgaacctccggtgtccgagcagttggacgtggccggacgtgtgatgcagtacgtgaatggggcagccacgactcatcagctgccagtggctgaagctatgctgacatgtcgccacaagtttcccgacgaagatagctatcaaaagttcattccattcataggtgttgtcaaggtaggtctggtcgaggattcaccttctacagcaggggatggcgacgattcacccgttgtgtcgctgacagtccctagcacgtcccctccatccagcagtggtctgagtagggacgccactgcaaccccaccgtcatctccgtcaatgagttctgcactcgccatagtgggttctccaaactcaccctatggcgacgtgattggcctccaggtcgactactggctggggcaccccggtgaacgacggagagaaggcgataagcgggacgccagttctaagaataccttaaagtccgtgtttaggtctgtccaggtatcgaggttgcctcacagtggggaggcacaactttcggggaccatggcaatgacagtcgttactaaggaaaaaaataaaaaagtacctactattttcctgtcgaagaagcccagggagaaagaggtggactctaaatctcaagtcattgagggaatttccaggttaatttgcagtgccaagcagcagcaaaccatgctaagagtctcgattgacggtgtagaatggagtgacatcaaattctttcagctggcagcccaatggcctacgcatgtgaagcacttcccagtgggcctgttcagcggatctaaggcaacatag

SEQ ID NO: 31196 - DNA, 435 bp, synthetic construct
  source 1..435: mol_type = other DNA; note = Synthetic coding sequence
atggtggcaatggccgaggcagaagctggcgtggccgtagaggtgaggggtctacccccagctgtccccgatgaactgcttacgctgtatttcgagaataggcgcagatccggcggaggccctgtattatcctggcaaaggctgggttgcggcggagtgctcacctttcgtgagccagcagacgctgaacgtgtcctggcccaggcagatcacgaacttcatggcgctcaattgagtctcaggccagccccacccagagcccctgccaggctcttgctgcagggactgccgcctggtacaactccacaaaggctcgagcagcatgtccaagccctgctgagagcatctggcttgcctgtacaaccttgttgcgccttggcctccccgagacccgatcgggcactggtgcagctgcctaaacccctgagtgagtag

SEQ ID NO: 31197 - DNA, 513 bp, synthetic construct
  source 1..513: mol_type = other DNA; note = Synthetic coding sequence
atggcctctgaggccgagaaaactttccatcggttcgctgccttcggggaatccagcagttctgggacagagatgaataacaaaaacttctccaagttgtgcaaggattgcggaattatggacgggaaaacagtgacatcaactgacgttgacatagtgttttccaaggtaaaggcaaaaaatgcccgtactattactttccagcaatttaaggaggccgtaaaagaactaggccagaaacgatttaagggaaagtctccggatgaagtgctggaaaatatctatgggcttatggagggtaaggacccagccaccaccggggctacgaaagccaccactgtcggcgcagtggataggctgacagacacttctaagtacaccgggactcataaagagcggttcgacgagtctgggaagggaaagggaatcgccggacgggaggaaatgactgacaacactggctacgtcagtggctataaaggttcaggcacgtatgacaagaaaacgaagtag

SEQ ID NO: 31198 - DNA, 270 bp, synthetic construct
  source 1..270: mol_type = other DNA; note = Synthetic coding sequence
atggtagccatggcagaggcagaagcgggagttgcggtggaggtcaggggattaccaccagcagtgccagacgaactccttactctctattttgagaaccggaggcgatccggtggaggacccgtgctaagctggcagaggctgggttgtggaggggtcctgacctttcgggagcctgccgatgctgagcgcgtactcgcacaggcagaccatgagctccacggggctcaactttctctgcgtcccgctcctcctcgggcacccgcatag

SEQ ID NO: 31199 - DNA, 1206 bp, synthetic construct
  source 1..1206: mol_type = other DNA; note = Synthetic coding sequence
atgtgtgtggagatcagtctgaaaacctccgaaggagactccatggaactagagatctggtgccttgagatgaatgagaagtgcgataaggaaatcaaggtgtcgtatacagtatataacaggctgtcactgcttctgaagagcttactcgccatcactcgggtaacgcctgcctacagattatcccgcaaacaaggtcacgagtacgttatcctttaccggatctattttggcgaggtccagctttcgggactaggagaaggtttccaaacggttcgtgtcgggaccgtcggcacacctgtggggaccatcacactttcttgtgcatatagaattaatctggcatttatgtccacccggcagtttgaaaggacccctcccattatggggatcataattgatcactttgttgatagaccataccctagcagcagccccatgcacccttgcaattatcgtacagccggtgaggacaccggtgtaatatatcctagtgtcgaggacagccaggaggtctgcaccacaagcttcagcacctccccaccaagccagcttatggtccctgggaaagagggtggggtgcctcttgcgcctaaccagcctgtccatggaacacaggctgatcaggagcgcttagctacgtgtacaccgtcagatcgaacacattgtgccgctactccaagcagcagcgaggatactgagacagtctcaaactcgtcggagggtcgggcttcaccgcatgacgtgttggaaacaatattcgttaggaaggtcggcgcatttgtgaacaagcctatcaaccaagtgacgctcacgtccctcgacattcccttcgccatgtttgcacctaaaaatctcgagctcgaagacacggatcctatggtaaaccccccagactctccggaaactgagtcaccactccagggttcgctgcacagcgatggtagctctggtggctcttctggcaatacccacgacgattttgtcatgatagactttaagcccgcattctctaaagatgacatcctccctatggatctgggtacattctacagggaatttcagaatcccccacaactgagtagcctgagtattgatatcggagcacagtccatggccgaggacctggactctctgccagagaagctggccgtccatgaaaagaatgtgagggagttcgacgcattcgtggaaacactgcaatag

SEQ ID NO: 31200 - DNA, 2148 bp, synthetic construct
  source 1..2148: mol_type = other DNA; note = Synthetic coding sequence
atgtcccaatctggggcagtttcatgttgccctggtgccacaaacgggtccctcggacgctctgacggtgtagctaaaatgagtcccaaggatttatttgagcagcggaaaaagtattccaatagcaatgtgataatgcatgagacgagccagtatcacgtgcagcatctggctactttcatcatggataaatctgaggcaataacaagcgtcgatgacgccatcagaaagctggtccagctctcttcaaaggagaagatttggactcaagagatgctattacaggtgaacgatcagtcactgagactcttagacattgaatcgcaggaggaattagaggattttcctttacccactgtccagcgctcacagacggtgttaaatcagttgcgatatccaagcgtcttgttgctggtatgtcaggactcagagcagagcaagcctgacgtgcacttctttcactgcgatgaggtagaagcagagctggtacatgaagatattgagagtgcacttgccgattgcaggcttggaaagaagatgaggccccagacgctgaaggggcaccaggaaaagatcaggcagcgtcagagcatccttccaccaccccaggggcctgcacccatcccctttcagcacaggggcggagactctcctgaagcaaagaatcgcgtcggccctcaagttccactaagtgagccaggctttcgccgacgagagtcacaagaagaacccagagcggtgttggcacagaagatcgaaaaggagacccagattctgaactgcgctctcgatgatatagaatggtttgtggccagactacaaaaggccgctgaagccttcaaacagctgaaccaacgcaaaaaaggcaaaaaaaaaggcaagaaagctcctgccgaaggtgtgctgaccctgcgagctaggcctccatctgagggagagtttattgactgttttcagaagattaaactggcaattaacctgctggcgaaactgcagaagcacattcagaacccgagcgctgcggaactggtccacttccttttcggaccactggacctcatcgttaacacctgctctggaccagacattgcccgaagcgtttcctgccctctcctgagcagggatgccgtggattttttgcgaggacaccttgtacccaaagagatgtctttgtgggaaagccttggagagagttggatgcggccacgcagtgagtggccacgagagccccaggtgcctctctacgttccaaagttccactcaggttgggaacctccagtcgacgtattgcaggaggcgccatgggaagtggagggcttggccagtgccccaatcgaggaagttagccctgttagtcgccagtccattcggaattctcagaaacattctcccaccagtgagcccacccctcccggtgacgccctgccgcctgtttccagcccacatactcaccggggataccagccaactccggctatggcgaaatatgtcaagattctctatgattttaccgcccgaaacgctaacgaattgtcagtcctgaaggatgaagtgctggaagttctggaggatggtaggcagtggtggaagctccggtccaggagtgggcaggccggatatgtgccatgtaatatccttggagaagccaggcctgaggatgcaggcgctccattcgaacaggccggacagaaatactgggggcctgcctcgccaacgcacaagctgcccccatcattcccagggaataaagatgagcttatgcaacacatggacgaagtcaacgatgagctcatcaggaagatctctaacatccgagctcaacctcagaggcacttccgcgtggagcgatcccagcctgtgagtcagcctctaacctatgagtccggcccagatgaggtcagagcatggctagaggctaaggctttctctccgagaatcgtcgaaaatctcgggatcctgacgggaccccaactgttttctttgaacaaggaggagctcaaaaaagtttgcggtgaagagggggtcagagtgtattcacagctgactatgcaaaaagctttcctggagaagcagcagtccgggagtgagctcgaggaactcatgaacaaattccactccatgaatcagcggaggggggaagatagctag

SEQ ID NO: 31201 - DNA, 336 bp, synthetic construct
  source 1..336: mol_type = other DNA; note = Synthetic coding sequence
atgaccggttctaattcacatatcacaatactgacccttaaagtgttacctcattttgagtcactggggaagcaggaaaaaatccctaataaaatgagcgccttccgaaaccactgtccccaccttgattccgtgggggagatcaccaaagaagatcttattcaaaagtccctgggaacctgccaggactgtaaggttcagggccctaacttgtgggcctgcctggagaaccggtgcagttatgtgggttgcggggagtcgcaggtggatcacagcactatacactctcaggagacaaaacactacctgactgttaacctcacaacactgaggtag

SEQ ID NO: 31202 - DNA, 228 bp, synthetic construct
  source 1..228: mol_type = other DNA; note = Synthetic coding sequence
atggcaggccaggaggaccccgtccagagggaaatacatcaggattgggccaacagagaatacattgaaatcattacctcctccataaagaaaatagcagatttcttgaatagctttgatatgtcttgcagatctagattggcaaccttgaatgagaagctgactgcgctcgagagaaggatcgagtacatcgaagcccgagtaacaaaaggggaaactcttacctag

SEQ ID NO: 31203 - DNA, 348 bp, synthetic construct
  source 1..348: mol_type = other DNA; note = Synthetic coding sequence
atgcgttatgtagcctcatacctcttggctgcccttggcggaaactcctctccgagtgctaaagatataaagaagattctggacagcgtggggattgaagccgacgatgatagactgaacaaagtgatctcagagctgaatggaaagaatatcgaggatgtgatcgcgcaaggtatcggcaagctcgcctctgtacctgccggaggagccgtggctgtgtctgcagctccaggatctgcagcccctgccgcaggcagcgcacccgcagccgctgaagagaaaaaagacgaaaagaaggaggaatcagaagagtccgacgatgatatggggttcgggctgttcgattag

SEQ ID NO: 31204 - DNA, 1077 bp, synthetic construct
  source 1..1077: mol_type = other DNA; note = Synthetic coding sequence
atgccaggctgcgaattaccggttggaacttgtccggatatgtgtccagctgccgaaagagctcagcgggagcgggagcataggttacaccgcctcgaagtagttcccggatgtcgtcaagaccctcctcgtgctgatccccaacgggctgtgaaggaatattcaagaccagcagccggtaagccaaggccaccaccgtcccagcttaggcctcccagcgtgctcctagcaactgtgaggtaccttgctggggaggtcgctgagagcgctgacatagccagggcagaagtagcttcattcgtggcggatcgtctcagggcagtgctgctggatctcgctttacagggtgccggagatgcagaggcagctgttgtgctggaggcagcactggcgaccctcttgactgtggtagcgcgtttgggcccagatgccgcacgcggaccagccgaccctgtgcttctgcaggctcaggtgcaggaaggtttcggttccctgaggaggtgctacgcccgtggtgccggaccccatccacggcaacccgcttttcagggactgttcctgttatacaacttaggatctgtcgaagccctgcacgaggtgctgcagctgccagcagccctgagggcatgcccaccactgcgcaaagctcttgcagtggacgccgcatttcgagaaggaaacgcagcacgtctctttagacttctccagaccttgccttatctaccatcctgtgcagtgcagtgtcacgtgggccacgctagaagggaagcactggcaagattcgcgagggccttttccacgccaaagggtcagaccctgcctctaggcttcatggtgaacctgttggctcttgatgggcttcgggaggccagagacctctgtcaggctcatggactcccactggatggcgaagaacgagtagtgttcctgcgcggaagatatgttgaagagggcctccctcctgcgtctacatgcaaagtgctcgtggagagcaagctgagaggcagaactctggaggaggtagtcatggctgaggaagaggacgaaggcaccgatcggcctggctctccagcctag

SEQ ID NO: 31205 - DNA, 4047 bp, synthetic construct
  source 1..4047: mol_type = other DNA; note = Synthetic coding sequence
atggccgatactgatctcttcatggagtgcgaagaggaggagctggaaccatggcagaagatcagcgatgtgattgaggattctgtcgttgaggactataattccgtggacaagaccacaaccgcgggaaatcccttggtgcagcagggaggacagccattgatactgacccaaaaccctgcccctggtctgggaacaatggtcacccagccggtgctccgtcccgtgcaggtgatgcaaaacgcaaatcacgttacttcaagcccagttgctagccagccaatttttattactactcaaggatttccagtccggaacgtgagaccagtgcaaaatgcaatgaaccaagttggcattgtgctgaacgtacaacagggccaaactgttcgccctattactctggtgcccgcaccaggaacacagtttgtcaagcccaccgtcggcgtcccacaggtgttcagtcaaatgactccggtgcgcccaggaagcaccatgcctgtgagacccaccactaatacatttactaccgtgatcccggctacccttaccatccgcagcacggtgcctcagagtcagagccagcagactaagtcaactccatccacatcgactacgcctacagccacacagccaacctctttaggccagctggccgtgcagtctccaggacagagtaaccagacgaccaatccaaaactggtaagcattgcgagttttgtaacagtcaaaaggcctggcgtgaccggagaaaattctaacgaggtggcaaagctggtaaatacactgaacacaattcctagtttaggacagtcacccggaccggtggtggtttctaataattctagcgcccatggctcacagagaaccagcggacctgagagcagcatgaaggtgacttcttctattccagtcttcgaccttcaggacggagggaggaagatatgtccgagatgtaacgcacagttccgagtgactgaggctttacggggacatatgtgctactgttgccccgagatggttgaataccagaaaaagggcaaaagtctggattctgaaccctccgttcctagcgccgctaagccgcctagccccgagaagacagcccctgtagctagtacaccgtcatctacaccaattccagcgctgtctcccccaaccaaagttccagaaccaaatgagaacgtgggggatgccgtccagaccaaactgatcatgctggtcgacgacttttactacggacgcgatgggggtaaagtggctcaattgacaaattttccaaaagtggcgaccagcttccggtgcccacactgtacaaaacgtctgaagaacaacattaggttcatgaaccatatgaaacatcacgtcgaactcgatcaacaaaacggggaagtggatggccacaccatctgtcagcattgctaccgccagtttagcacaccgtttcagctccagtgtcatttggagaacgttcattccccttacgagagtactaccaaatgtaaaatctgtgaatgggctttcgagagtgaaccgctgtttctgcagcacatgaaggacacacacaagcctggtgaaatgccctatgtgtgtcaagtttgccagtacagatcctccctttattcagaagtcgacgtgcacttcaggatgatacacgaggacacaagacatctgctgtgcccttactgtctgaaggtgttcaagaatggcaatgctttccagcagcattatatgcggcaccagaagcgaaacgtctatcactgcaataagtgtcgcctccagtttctttttgcaaaggacaaaattgagcacaagttgcagcaccataagacgtttcggaagccgaagcagctggaaggactaaagccgggaaccaaggtgacaattagggcatccagaggacagcctagaactgtgcccgtgtcttctaacgacactccgccttccgcactccaggaggcagcacccctcactagttccatggaccccctccccgtatttctctacccacccgtgcagcggtctattcaaaaaagggctgtccggaaaatgagtgtgatggggagacagacatgtctggaatgttcatttgagattcctgacttccccaaccactttcctacctacgtgcactgcagcctgtgccgctactctacttgttgctcaagggcatacgctaaccatatgatcaataaccacgtcccccgaaaaagtccaaaataccttgccctttttaagaattcagtgtcaggtatcaaacttgcgtgtacgtcgtgtacattcgtcacatccgttggagacgccatggctaaacacctggtctttaatccctctcaccggagttcatccatattaccaaggggcctgacctggatcgctcactcccgacatgggcagaccagagaccgggtacacgatcggaatgtgaaaaacatgtaccctcccccttcttttccaacaaacaaagccgctactgtgaaatcagcaggggcaacacccgcagaaccagaagagttattgactccactggctccagctcttcctagcccagccagcactgctaccccccctccaacacctactcacccccaagccttagctctaccgcctctggccacagagggcgctgagtgtttaaatgttgacgatcaggacgaagggtctcccgtcactcaggaacctgagctcgcctccggcggaggaggttcaggaggagtgggcaagaaggaacaactgagtgtcaagaaactgagagtggttctgttcgccctctgttgtaataccgagcaggcagcagagcatttcagaaacccccaacggagaatccggaggtggttgcgaagatttcaagcctcccaaggcgagaatttggaggggaagtacctgtctttcgaggccgaggaaaagcttgctgaatgggttctcacccagcgcgagcagcagctgcccgtgaacgaagaaaccctattccaaaaagctaccaaaattggacgaagcctggagggcggttttaaaatctcctatgaatgggccgtgagatttatgctaaggcaccatctgacccctcatgcaagacgtgccgtggcccacaccctgccgaaagacgtggccgaaaacgcgggacttttcatcgatttcgtccagagacagatccacaaccaagaccttcccctgtccatgatcgttgcaattgatgagatctccctgttcctcgacactgaagtgttgtccagcgatgacaggaaggagaacgccttgcagactgtgggaacgggggaaccatggtgcgatgtggtcttggccattcttgcggatggaaccgttctgcctaccttagtgttctatcggggacagatggatcaaccggcaaacatgccagactctatactcctggaggcaaaggaatctggctactctgacgacgaaataatggaactgtggtccaccagagtgtggcagaagcacaccgcttgccagcgcagcaagggaatgctggtaatggactgccatagaacccatttgagcgaggaggttctggcgatgttatccgctagctcaaccctcccagccgtagtgcctgccggttgctcctccaagattcaacctctcgacgtgtgtatcaagcgcaccgtgaagaattttttgcataaaaaatggaaagaacaagctagggagatggccgacactgcatgtgattctgatgtgctcctgcagttagtcctcgtctggctgggggaggtgcttggggttatcggagattgtcccgaactggtgcagagatccttccttgtcgcgtcagtcctccccggtcccgacgggaacattaatagccccactagaaacgccgacatgcaagaggagctaattgcctctctcgaggagcagctaaaattatccggagaacactccgagtcatccacaccacggccacgaagctcacctgaagaaactatcgaacctgaatccctccaccaactgtttgagggcgagtccgaaacagagtctttctacggattcgaagaagcagatttggacctaatggaaatatag

SEQ ID NO: 31206 - DNA, 561 bp, synthetic construct
  source 1..561: mol_type = other DNA; note = Synthetic coding sequence
atgttttggaaatttgacctccattcatcttcgcacatcgacacactactggagcgggaggatgttacgttaaaggagctgatggacgaagaagatgtgctgcaagagtgcaaggcccaaaaccgcaagttgattgagttcctcctgaaggccgagtgcttggaggatctggtttcttttatcattgaagaaccaccgcaagacatggatgagaagattcgctacaaatatcctaacatttcttgcgagttattgacatctgacgtctcccagatgaacgaccggctaggggaagatgaatctttgctgatgaagctctactcatttcttctgaacgacagcccgctcaatccgctgctggctagcttcttttcaaaggtgctatctattctgatatctcgcaagcccgagcagatcgtggacttcctgaagaaaaagcacgatttcgtagatctcatcataaagcatatcggcacttctgccataatggacctgcttctgagacttctgacatgtatagaaccaccccagccgagacaggatgtgcttaactggctgtag

SEQ ID NO: 31207 - DNA, 288 bp, synthetic construct
  source 1..288: mol_type = other DNA; note = Synthetic coding sequence
atgtctcagtctggggcagtgtcatgttgcccgggagccactaacggaagcctgggcaggtctgatggagtggccaagatgtcgccaaaggacctgtttgagcaacggaaaaaatacagcaacagcaatgtaattatgcacgagacaagtcagtaccatgtgcagcatctggccacattcatcatggacaagtctgaggcaattacctctgttgatgacgcaattagaaaactggtgcagctgtcttctaaggagaagatatggactcaagaaatgcttctacagtag

SEQ ID NO: 31208 - DNA, 1740 bp, synthetic construct
  source 1..1740: mol_type = other DNA; note = Synthetic coding sequence
atggatgattccaaacaagaatctaccacctcaaaggaggaagaaaccaatatcatcagcagcatagtgccctctacccaggacatctaccaacggcagaattcaagcgatgtgcacaaaagcctgctgcccgcagtggacgagacgacttgcggacatacacactttcagcagatgattgacaaatatataaacgaagcgaacctcatcccggaaaagaccgacctccaagagctggaacatatctttccgaacttgcatcatcaactgtttaaacctctggaaccgcaccctgacttcgacctgagttcatcctcctcgggcatctcccccgacaatagagacttttaccagcggtccgatagttcgagtgaatcccactgtgccaccggcttgtccaaaagtacagtctactttacagccctccgacggactagcatgcatagttctcttaatacatctcccaaccagcagcctgacaccaacctggctcacgtaggcgcacattctttcgcaaccgaaaatattattggtggctcggaacagtgtttcgaacagctgcagccagaatactcatctcaggaggagagccagcatgcggacttgcctagcattttctctatcgaggccagagacagctcccagggaatgaagaaccagaactacccctccgaagagcacaccgagattctccagaataagaagaagattgttcactttcagctatccattgggaacctgtctagtgtctattcttcctcagatgaagccaatgtgtttgatcagctgaatgtgcagcacagcactccttgtggaagcaattccagtgagtgctccacaaaacatcagttggaaagcaggaaggagagcatggggttcgaagagttgagtaaacgaggggtggttacaatgctacagtcacaagggctgattgaagacaataagaacgagacctgccgagtgcttgacatcaacccacaggtggaagagactgatagtagattatgcgttcggaccgtggaaatgggaacttccatccaggcgccttactcactcaccactcagaatgagaaatattttgagaatagcgctgaaaccgacatcccgaagattacaaagaagctgtcgcaactgggcgaatctgaactgttcgcatcatcaggctctttctcgctgcagtcttctatccctgtgtgggagaccgagaccggccacggcatcatggaggaacccgagttaactctgattagcacaaccgacacttctattgccgagatggacttcgccaaccttacacttgaagaaaaaagtgaaaatgaagctaagtgcttcttccaggtgtccgaatttctcccactggtcagcgccacagaagcttcggactatccggctgttagcgagctgtcgatcgagaaacctcgcactgctagcactgccgaaactcctagacgtctgacacccgtgcctgggagcctgcaggaggcattcatcaaacggaaaaaatcctttatggagcggtcgcaccaaaggcagaaggaaatcaggaacaagattcacgtttcagaaaactctcagattaagaccgtaaaggaaaaaccgagcatcagcagctctgttagcaggttgaagggtgttaacaaggtcagggccagtttcccggaggatcggaagactacccaggctctgcgacatcagcgagggctccggctgtacaatcagctcgccgaagtcaagcagtag

SEQ ID NO: 31209 - DNA, 435 bp, synthetic construct
  source 1..435: mol_type = other DNA; note = Synthetic coding sequence
atggtggccatggcggaggcggaggcgggagttgcggtggaggttagaggccttccccctgcagtacccgatgagctgctgacgctgtatttcgaaaatagacgtcgtagcggcggaggccctgtgttgagttggcagagactggggtgcggaggagttttgaccttcagagaacccgctgatgctgagcgagtcctggcgcaggcggatcacgaactacacggagcccagctttcactccgacccgctcccccacgcgctcctgctagattactcctgcagggcctgccccctgggactaccccccagcgcctggaacaacatgtccaagcactgcttcgagccagcggcttgcctgttcaaccctgctgcgctttagcctctccacggccagaccgtgccctcgtccagctgcctaaacccctctctgaatag

SEQ ID NO: 31210 - DNA, 246 bp, synthetic construct
  source 1..246: mol_type = other DNA; note = Synthetic coding sequence
atggtggccatggcggaggccgaggctggggtggcagtcgaggtgcgtgggctccccccagccgtccccgacgaactgctcactctgtatttcgagaaccgtcggcgatctggaggcggtccagtcctcagctggcagcgactgggctgcggaggagtccttacttttagagagccagccgatgctgagcgagtgttagctcaggctgaccatgagctgcacggcgcacagctgtccttacgttag

SEQ ID NO: 31211 - DNA, 1539 bp, synthetic construct
  source 1..1539: mol_type = other DNA; note = Synthetic coding sequence
atggccgctttcaaactggacttcctgcctgaaatgatggtcgaccactgcagccttaattcgagccccgtgagcaaaaagatgaatggtactcttgatcaccccgaccagccagatctcgatgccatcaagatgttcgtgggccaggtgccccgtacctggtcagaaaaagatctcagagaattatttgagcagtacggggcagtttacgagatcaatgtcttaagagaccgttcccaaaatccacctcagtctaaaggctgttgcttcgtcacattctacacccgcaaggccgctttggaggcacagaacgctcttcacaacatgaaggtgctgcctggtatgcatcaccccatccagatgaagccagctgactcagagaaaaataacgtggaagacaggaaactgttcatcgggatgatttccaaaaaatgcactgaaaatgatatcagggtgatgttctcgagcttcggtcagatcgaggaatgccggatcctgcggggtcccgatggcctgagccggggatgtgctttcgtgacctttaccacacgcgctatggcacagaccgcaattaaggcaatgcaccaggctcagactatggaagggtgctcgtccccaatggtggtcaagttcgctgatacccagaaagataaggagcaaaagcgtatggcacagcagctccagcagcagatgcagcagatctctgccgcatcagtctgggggaatcttgctggcctgaatacattgggaccccagtatctggctctgtatttacagctactccaacagacagcctcttctgggaacctgaatacactgtctagcctccacccgatgggcggtcttaacgccatgcaactgcagaatttagccgctttggccgcagcagctagtgctgcacagaacacaccttcaggaaccaacgcccttactacaagctcctcacctttgtcagtgctgacctcttctggatcttcccctagcagctccagttccaattcggtcaatccgatcgctagtctgggggctctacagactctggcaggtgcaaccgccggactgaatgtcgggtcattggcgggtatggccgctcttaacggcggacttgggtcctccggtctgtccaatgggactgggagtacgatggaggcactgacccaagcgtattccgggattcagcaatacgccgctgcagcactcccgactctctataaccagaatctgctgactcaacagtcaattggggcagctggttcgcagaaggagggtcctgaaggcgcaaacctctttatttaccatctccctcaagagttcggcgaccaggatctgttgcagatgttcatgccttttggcaacgtggtcagcgctaaggtgtttatagataagcagacaaacctatccaagtgctttggcttcgtttcatatgacaaccccgtctcagcacaggccgctatccagagcatgaatggcttccagataggcatgaaaagactaaaagttcagctgaagcgctcaaagaacgacagtaagccttactag

SEQ ID NO: 31212 - DNA, 1131 bp, synthetic construct
  source 1..1131: mol_type = other DNA; note = Synthetic coding sequence
atgaaagacgtgccgggtttcctgcagcagagtcagaactccggcccagggcaaccagctgtttggcatcgcttggaggaactgtacacaaaaaagctgtggcaccagcttactctccaggtcctggatttcgtccaggacccatgcttcgctcagggagacggcctgattaaactgtacgagaactttatctctgaatttgaacaccgtgtcaaccccctgtcactagtggaaatcatcctgcacgtggttcgccagatgaccgaccccaatgtggcactgactttcctggaaaagactcgagaaaaagtgaaatcaagcgacgaggccgtgattctctgcaagaccgccatcggcgctctaaagttaaacatcggtgatttacaagtcacaaaagagactatcgaggacgtcgaagaaatgctgaataatctgccaggtgtgaccagcgtgcattccagattctacgacctcagcagtaagtactaccagaccatcgggaatcatgccagctactataaggacgccctgcggtttctgggctgcgtagatataaaggacctcccggtctccgagcaacaggaacgggctttcacattaggactggctgggctcctgggcgaaggagtctttaatttcggtgaactgctcatgcacccagtcctggaatcactaaggaacaccgacagacagtggctcatagacacgctatatgctttcaatagtggaaatgtggagcgttttcagacactcaagaccgcttggggtcagcagccggatcttgcagctaatgaagcccagctattacgcaaaatccagttgctgtgtctcatggaaatgacatttacgaggcccgctaaccacaggcagctgactttcgaggagattgccaaatcggccaagatcacggtaaacgaggtcgaattgctggttatgaaggccttgagcgtcggactggttaagggttctattgatgaagtggacaagcgggtgcatatgacctgggtccagccaagggtgcttgatctccaacagattaaaggcatgaaagaccgcctggagttctggtgtaccgacgtgaaatcaatggagatgcttgtcgaacatcaagctcatgacatactgacctag

SEQ ID NO: 31213 - DNA, 489 bp, synthetic construct
  source 1..489: mol_type = other DNA; note = Synthetic coding sequence
atgacaagtaaaaagctggtgaatagcgtcgccggatgcgctgacgatgcccttgcaggcctggtggcttgcaatcctaacctgcaactactgcagggtcaccgcgttgcactcagatctgacctcgattcattgaaaggacgcgttgccttgctgagcgggggaggcagtggccatgaaccagcccacgcagggtttatcgggaaaggtatgcttacaggcgtcattgctggcgctgtttttaccagccccgcagtgggcagtatcctggccgctatcagagctgttgcacaggcagggaccgtgggtacattactgatcgtcaaaaattataccggtgaccggctaaattttggcttagcccgagaacaggcgcgagctgagggcattcccgttgagatggtggtgattggtgacgattcggcctttaccgtcttgaaaaaagccggacgccgtggtctatgtggcacggtcctgatccacaaatag

SEQ ID NO: 31214 - DNA, 7853 bp, synthetic construct
  source 1..7853: mol_type = other DNA; note = Synthetic coding sequence
atgctgaccgatagtggcggtggtggtaccagtttcgaggaggacctggattcagtagctccacgctctgcccctgccggtgcatcagagccacctccccctggcggtgtgggattgggaatccggactgttcgattatttggcgaggctggaccggcatccggggtcggctcctctggtgggggaggctcaggaagcggaaccgggggaggagatgcagccctcgatttcaagctggccgctgcggtcttacggaccggcggaggaggtggtgcaagcggaagcgacgaagacgaggtctccgaggtcgaatcttttatccttgatcaggaagatctcgacaatcctgtgctcaagactacttccgaaatctttctgtcctccacagccgagggagccgacctgagaacagtagatcccgagacccaggcacgtctagaggctctgttagaagcagctggaattggcaagttgtccacggccgatggaaaggcctttgccgatcccgaggtgctgaggcgcctgacgagcagcgtatcctgcgccctcgacgaggcagcagcagcactgactcgcatgaaagctgagaactctcacaatgccggacaggtcgacactcgctcgctcgcagaggcctgtagtgacggtgatgtgaatgccgttcgcaagctgctggatgagggcaggagtgtgaatgagcacactgaggagggagagtctttactttgcctcgcctgctcagcaggctactacgagctagctcaggtgttgctcgccatgcacgcaaatgtggaggacagagggaataagggtgacatcactccgctgatggctgcctcaagcgggggatatctggatatagtgaagctgctcctgctgcacgatgccgatgtcaatagtcagagcgccaccggaaatactgccctcacctatgcatgtgcaggcggattcgttgatattgtcaaggtcctgttaaatgaaggtgccaatatcgaggatcataatgaaaatggacacactccactgatggaagccgctagtgccggacatgtagaagtggctcgtgtgctcttagaccatggcgctggcataaacactcattcgaacgaatttaaggaatcagccctgacattggcctgttacaaagggcatttggatatggtccgtttccttttagaggccggagcagatcaggagcataaaaccgacgagatgcacacggccctgatggaagcctgcatggacgggcacgtcgaggtggccaggcttctccttgactcaggagctcaggtgaacatgcccgctgatagttttgagtcgcctctcactctggcagcatgtggcggtcatgttgaactggctgctctgcttatagagagaggtgctaatcttgaggaagtgaatgacgaaggctatacgccgctgatggaggccgctcgggaagggcatgaggaaatggtcgccctacttctggcccagggcgctaacataaatgcgcagactgaggaaactcaagagaccgccctcactctggcatgctgtggcggattctcggaagtggccgatttcttgattaaggcaggcgcagatattgaactagggtgttccactccactgatggaggccagccaagagggacacctggagttagtcaagtaccttctggcatccggcgcaaatgttcatgccaccaccgccactggcgataccgcgctgacgtacgcctgtgaaaacgggcacactgatgtcgccgatgtgttgctgcaggcaggagccgacctcgaacacgagagtgaaggaggtcgcacccctctcatgaaagcggctcgtgcagggcacctgtgtaccgtgcaatttctaatcagcaagggtgccaatgtaaacagggccacggccaataacgaccataccgtcgtcagcctggcgtgtgccggaggccatctcgcagtcgtcgaacttctgctagcacatggggcagatccaactcacaggctgaaagacgggtctaccatgctgatcgaagccgcaaaagggggtcatacaaatgtggtgagctatcttctggactaccccaacaacgtgttgtccgtcccaaccactgatgtgagccagttgcctccaccttcacaggaccagtctcaggttccaagggtacccacccatactttggcaatggtggtgccaccccaggagcctgaccgtacatcccaggaaaattcaccggcactactgggggtccagaaggggacctcaaagcagaaatcctctagtctgcaggtagcggatcaggatcttctgccttccttccacccttaccagccgcttgagtgtattgtggaggaaactgaaggtaaactgaacgaactaggtcagaggatctccgccatagagaaggcgcagctaaagtctctggaattgattcagggtgaaccattaaataaggataagatcgaggagctcaagaagaatagagaagagcaggtccaaaaaaagaagaaaatcctgaaggagttacagaaagtcgagcgacagttacaaatgaagactcagcagcaatttaccaaggagtatctcgagaccaaaggccagaaggataccgtcagcctgcaccagcagtgttcacatcgcggagtgttcccagagggcgagggagacggatctctgcctgaggaccatttttccgagctgcctcaggtcgacacgatcctgtttaaagacaacgatgtggacgatgagcaacagagtccacccagcgcggagcagatcgattttgtgccggtacagcccctttccagcccacagtgcaacttcagctccgatttaggatccaacggcaccaatagccttgaactgcagaaggtgtcaggcaaccaacagatagtggggcaaccacagatagcgattacaggccacgaccaggggctgctggtccaggaaccagacgggttaatggtagctacaccagcacagactttaacagacactctggatgatttaatagcagcagtgagtacaagggtgcctacaggatcaaactcctctagtcagacgacagaatgccttacacccgaaagctgttcccagacaactagtaatgtggcctcccagagcatgccaccggtttacccaagcgttgacattgacgctcatacggagtcgaatcacgatacagccctgacacttgcctgcgccggagggcacgaagagctagtctcagtgctgattgctagagatgccaagattgaacaccgggataaaaagggcttcacacctctgatattggccgcaacggcgggacacgtgggggttgttgagatcctgttggataaaggcggagatatcgaggcccagagtgagcgcacaaaggataccccattgagcctggcttgcagcggtgggagacaagaggttgttgatctgttgctcgccaggggggcaaacaaagagcaccgaaatgtgagcgattacacccccctgagtctcgctgcttccgggggatatgtgaacatcataaagattttactgaacgccggagccgagattaattctcggacaggcagtaagttagggatatcaccactcatgctggctgccatgaacggccatgtgccagcagtaaagctgctcctggatatgggctctgacataaatgcccaaattgaaacaaacagaaacacagccctcaccttagcctgtttccaggggagggctgaagtggtgagcctgttgttggataggaaagctaatgtggaacatagagcaaaaaccggcctaaccccccttatggaggctgcatccgggggatatgctgaggtgggacgagtccttctcgacaagggtgctgatgttaatgcgccaccggtaccttcatccagggataccgctctcaccattgcagctgacaaaggacattataaattctgcgagctcctgatacacagaggcgcacacatagatgtcaggaacaaaaaaggcaatactcccctctggctagccagcaacgggggtcatttcgatgtggttcagttgctggtgcaggcgggtgctgatgtagatgcggcagataatagaaagatcaccccgctcatgagtgcctttcgcaaggggcacgtgaaggtcgttcagtatctcgtcaaagaggtgaaccagtttcccagcgacatcgaatgtatgcgttatattgctaccattactgataaagagttgctgaagaaatgtcaccagtgtgttgagactattgtcaaagcaaaggaccaacaagccgctgaggccaataagaacgcatccatcttattgaaagaattggatttggagaagtcacgcgaagagtcgcgtaagcaagcccttgccgcaaaaagggaaaagagaaaggagaagaggaaaaaaaagaaggaggaacaaaaaagaaagcaggaggaagatgaggagaataaacctaaagaaaacagcgaactccctgaggacgaggatgaggaggagaacgatgaggatgtggaacaggaagtgcctatcgaaccgccatccgccaccaccacaactacgatcgggatcagtgccactagcgcgaccttcaccaatgtatttgggaagaaaagggccaacgtggtgactacaccttccacaaacagaaagaacaaaaaaaataaaactaaggagacccccccaaccgcccacttaatcctcccagaacagcatatgtcactcgctcagcagaaagccgataagaataaaatcaatggagagcctagaggcggtggtgctggcggaaactcagacagcgataatctggacagcactgattgcaattccgagagttcttctggtggaaaatcccaggagctgaattttgtcatggatgtgaactccagcaaataccctagcctgctcctacatagtcaggaggagaagactagtaccgccaccagtaagacacaaacgcgactcgagggggaggtgactcctaacagtctaagtaccagctacaagaccgtgtctttgcccctaagcagcccaaatatcaagctcaatctgacatctcccaagcggggacagaagcgcgaagaaggttggaaggaggtagtgcgtcgttctaaaaagttgagcgtccccgcttccgtggtgtcacggattatgggcagggggggatgcaacatcacggccattcaggatgtcacaggagcccatatcgacgtggacaaacaaaaagacaagaatggtgagagaatgatcacaattcgtggcggaacggagtccaccaggtacgcagtccaactcataaatgctctgatacaagatccagcgaaggaactcgaagatctgattcctaagaatcacattcggacgcctgctagcactaagtctatccatgccaatttctcctccggagtgggcacaaccgcagcgagctctaaaaacgcttttccattgggcgcacccaccctggtgactagccaggccacaacgctctctacgtttcaacctgccaacaagctgaataaaaacgtgcctaccaatgtcagatcttccttccctgttagtttaccgttggcgtacccacacccccacttcgcactgcttgctgcacaaacaatgcaacaaatccggcacccacgtttgcctatggctcagtttgggggtactttcagcccctcccccaatacatgggggcctttcccagtgaggcccgtgaaccccggaaacacaaactcgagtccaaaacacaacaatactagccgcctgcccaatcagaacgggacagtcttaccctcggaaagtgctggtctggctacagcctcttgcccaattacagtatccagcgtagttgctgcttctcaacagttgtgcgtgacaaacacccgaacgccgagttccgtgcgaaaacagctgttcgcttgcgtgcccaagacctcaccacctgctacagtcatttcctcagtgacatctacctgttcctctctgccgagcgtctcaagcgcacccatcaccagcggacaggcaccaacaacctttttacctgcgagcacatcacaggcacagctctctagccaaaaaatggagtcttttagtgcggttccgcctactaaggaaaaagttagtacccaagatcaacccatggccaacctgtgcactcctagttccactgccaattcgtgttcaagtagcgcatcaaataccccgggtgctcccgaaacacatccaagtagctctcctactccaaccagcagcaacacacaagaggaggctcagccgagtagcgtttctgacttatctcccatgtccatgcctttcgcatcaaacagcgaacccgctcctttaacactgacatccccaagaatggtggccgcagacaaccaagacacatctaacctgccacaactcgctgtgcccgctccacgggtctcccatcgcatgcagccacgaggttcattctacagtatggttccaaatgcaactatacaccaggacccccagtctatattcgtgaccaatccagttacactgacccctcctcagggaccccctgccgctgtccagttatctagtgctgtcaatattatgaatggtagccagatgcatatcaatcctgccaacaaaagtttacccccaacgtttggtccagcaaccctattcaatcacttctcttccctgttcgattcttcacaggttcccgcaaaccagggatggggggatggcccattaagttccagggtggctactgacgcatcattcaccgttcagtcagcctttctcggaaactctgtgctggggcatctggaaaacatgcatccagacaattccaaggccccaggctttcgccctccctcccagcgggtgtccactagcccagttggtcttccctctattgatccttccggaagttcgccgtctagcagcagcgctcccctggcaagcttctctgggataccgggaacacgggtcttcctgcaggggccagcaccagtgggaacaccttcatttaatcggcagcatttctcacctcacccatggacttctgcttctaacagctcaacctccgcacctccgaccctcggccagcccaagggagtttctgcctctcaggatcgaaagattccccctcctattggcaccgaaagactcgcacgcattcggcaggggggttccgtcgcccaagcccctgcgggaacctccttcgtggcccctgtcggacactccgggatctggtctttcggtgtgaacgccgtctcagaggggctgagcggttggtcccagtctgtgatgggcaatcatcccatgcatcagcaattgtcagatcccagtaccttctcccagcatcagcccatggagagagatgactctggaatggtcgctccatcaaacatctttcatcagcctatggcatcgggattcgtggacttcagtaaggggctccctattagtatgtatggcggaacaatcatccccagccatcctcagctggctgacgtccccggaggtcccctgtttaatggccttcataaccccgatccagcttggaatccgatgatcaaggtgattcagaactcaacagaatgtaccgatgcccagcaggccagcctcctgcctagtgttcccgctttaaaaggagagataccatctccacagttgacccggcctaaaaagagaattggcagaccaatggttgcaagtcctaatcaacgacatcaggaccaccttcgtcctaaggtacctgctggggttcaagagctcacccactgcccagatacacccctgctccctccatctgactctagaggtcacaactcatccaatagcccatcattacaggctggaggtgccgaaggggctggagacagaggtcgagatactcgata

SEQ ID NO: 31215 - DNA, 753 bp, synthetic construct
  source 1..753: mol_type = other DNA; note = Synthetic coding sequence
atgggggatatcccagcggttggactctcctcatggaaggctagccctggaaaggtcaccgaggcagtgaaagaagcgatagatgctgggtatcgccactttgactgtgcttatttttatcataacgagagggaggtaggggctgggatccggtgcaagatcaaggagggcgctgtgagaagggaagacttgtttatagccacaaaactgtggtgtacctgccacaagaaaagcttggttgagacagcttgtcggaagagcttgaaggccttaaagctgaactacctggatctgtacctcatccattggccaatggggtttaagcctccccacccagagtggataatgtcctgttctgagctgtctttctgtctgtcacaccccagagtacaagacttacccctggacgaatctaatatggtcatcccttctgataccgattttctggacacttgggaagccatggaggatttggtgattacaggactggtgaaaaatatcggggttagcaatttcaatcatgagcaactcgaaagactcttgaacaaaccagggctcagatttaaaccgctcactaaccagattcttattaggttccagatccaaaggaacgtcattgttatacccggaagtatcactccttcgcacataaaggagaacattcaggtcttcgactttgagttgacccaacacgatatggacaacattctgtctttaaataggaatctgagactggctatgtttcctatgtag

SEQ ID NO: 31216 - DNA, 525 bp, synthetic construct
  source 1..525: mol_type = other DNA; note = Synthetic coding sequence
atgctgacggagaatggccaggtgctcagctgtggcagtaactcctttgggcaactcggcgtcccccacggccctcggagatgtgttgttcctcaggcaattgaactgcataaagagaaagtcgtttgcattgctgccggattacgtcacgctgtcgccgcaaccgcatcaggaattgtgttccaatggggaactgggctagcctcgtgcggcagaagactctgtcccggacaaaccttgcctctctttttcaccgccaaggagccatcccgtgtgaccggactagagaacagtaaggctatgtgtgtgctggctggaagcgatcattcagccagcttgaccgatgctggggaggtgtacgtgtggggatccaacaagcacgggcagttagccaacgaggctgcattcctaccggtgccccagaagattgaggcacattgctttcagaacgagaaggtgacagcgatatggagtgggtggacgcatctggtggcgcagactggacttctatggctgcgggcatag

SEQ ID NO: 31217 - DNA, 228 bp, synthetic construct
  source 1..228: mol_type = other DNA; note = Synthetic coding sequence
atgaaccgtagacggaagttcctcctcgcctcggttctcgccctgcagaactcctctttcatctatcccagttgtcagaagtgcttttcgcgtatcatccttgttagcaaaaggtctaactgcccgaaatgtggaagtacaggagaaagcggcaacgctaactacaggtataagcttagcctgaaggtggcggagtcaaataaactttttgtgatcaccgttttctag

SEQ ID NO: 31218 - DNA, 252 bp, synthetic construct
  source 1..252: mol_type = other DNA; note = Synthetic coding sequence
atggttgccatggctgaggcggaggccggtgtggccgtggaggtcaggggactgccgcctgcagtaccagatgagctattgaccttatactttgagaataggcgtcgaagcggtggaggcccagtcttaagctggcagaggctgggatgtggaggagtgcttaccttcagagagccagctgatgccgaaagggtcctagcgcaggctgaccatgagctccatggcgcacagttatctcttcgcccagcttag

SEQ ID NO: 31219 - DNA, 528 bp, synthetic construct
  source 1..528: mol_type = other DNA; note = Synthetic coding sequence
atgctgagcgaggaagaaaaggaggaactgaaagccgagcttgtgcaactcgaggatgaaattacaaccctcaggcaggtgctgagtgctaaggagaggcaccttgtggagattaagcagaaactgggcatgaacttgatgaacgagctcaagcagaatttctccaaaagctggcatgatatgcagaccacgactgcatataagaaaacgcacgaaaccctgagtcacgccggacagaaagccaccgctgctttctccaacgtgggaactgcgatctctaaaaagttcggcgacatgagctattccattcgacactccatctcaatgccggcaatgagaaacagtcctacattcaaatctttcgaggaacgggtcgaaactacggtaactagtctcaagaccaaagttggcggaactaatccaaatggagggagttttgaggaagtcctgagtagtacagcccatgcatcagcacagtccttagccggtgggagccgacggacaaaggaggaagaactgcagtgctag

SEQ ID NO: 31220 - DNA, 231 bp, synthetic construct
  source 1..231: mol_type = other DNA; note = Synthetic coding sequence
atgaatcgtcggagaaaatttctgctggcttctgtactggccctccagaacagctccttcatctacccatcatgccagaaatgcttcagtcgcattatcctggtgtccaaacgatccaactgccccaaatgcggatccaccggagagagtgggaacgcaaattatagatataagctgagcctaaaagtcgccgagtccaacaagctgtttgtgatcacagtgtttggctag

SEQ ID NO: 31221 - DNA, 456 bp, synthetic construct
  source 1..456: mol_type = other DNA; note = Synthetic coding sequence
atgtcaatccccttttccaatacccattataggatcccacaggggtttgggaatttgctggagggtctgacccgtgagatcctccgcgagcagcctgataatatcccagccttcgctgcagcttattttgagtcactactggaaaaaagagagaagactaacttcgaccctgccgagtgggggtcaaaggtggaggaccggttttataacaaccatgcgtttgaggagcaggaaccccctgagaaatcagaccccaaacaggaggagtcacaaatcagcggtaaggaagaagagacatccgttactatcctagactcctccgaggaggacaaggaaaaggaggaagttgcagctgtgaaaatacaagcagcctttagaggacatatcgccagggaggaggctaaaaagatgaaaactaatagcctgcaaaatgaggaaaaggaagagaataagtag

SEQ ID NO: 31222 - DNA, 270 bp, synthetic construct
  source 1..270: mol_type = other DNA; note = Synthetic coding sequence
atggaagcagcagacgcctccagaagtaatggttcttctccagaggccagagacgccagatccccaagcggaccttctgggagtctggagaatggaactaaagctgacggaaaagatgcaaagactaccaatggccatgggggtgaagctgccgagggaaaatccttgggctccgctctgaaacccggagaagggaggagtgctcttttcgcgggaaacgaatggcggagacccataatccagttcgttgagtcgggcgacgacaaatag

SEQ ID NO: 31223 - DNA, 1542 bp, synthetic construct
  source 1..1542: mol_type = other DNA; note = Synthetic coding sequence
atggaggtgggcattaccattcagcacgcttacgaaaagcagcatccatggatagatctgacttccatcggattcagttacgtgatcgacttcaacactatgggccagattaacaggcagacacagaggcagcgtcgggtgcggcgacgcttagacctgatttacccaatggtgaccggcacgctgccaaaagcacagtcctggcctgtgtcaccaggacccgcaacatcccctccgatgagcccctgcagctgcccgcagtgcgtgctcgtgatgtccgtaaaggccgcagtggtgaacgggtctacaggacccttacagctgcctgtcacacgaaaaaacatgccaccaccaggcgtggtgaagttacctcctttgccaggaagtggagccaagccactggattccaccgggacgatcagaggcccactgaaaacggccccaagccaagtcatccgcaggcaggctagctccatgcctaccggaacgacgatggggtcacccgcttcccctccgggacccaattctaaaacagggagagtggcccttgcaactctgaacaggaccaatctgcagagactggcgatcgcgcagtcacgggttctaatagcaagcggggttccaacagtgccagtcaaaaatctgaatggtagttccccggttaaccccgctctggctggaatcaccgggattctgatgtcagcagctggcttgcccgtctgcctgactagacccccaaagcttgtattgcatccgcctccagtgtccaagtctgaaattaaatccatccccggtgttagcaatacaagccgtaagacaacaaaaaagcaagccaaaaaggggaagaccccagaagaagtgttgaagaaatacctccagaaagtgagacacccacctgacgaggactgcaccatttgcatggaaaggctcaccgctccgtccggatacaagggacctcagcccacagttaaaccagatctggtcggtaaactgtctagatgtggacacgtgtaccatatctattgtctggtggctatgtataataacggaaataaggatggatctctccagtgtcctacctgtaagacaatttatggagttaagaccggaacgcagccccctgggaagatggagtaccacctgattccacactcactcccaggccaccctgactgcaagaccattcggatcatttacagtatcccccctgggatccagggacctgagcatcctaaccctggaaagtcatttagcgccagaggattcccccgacactgctacctacccgatagtgaaaaaggtcgcaaggtcttgaagttactgctggtggcctgggaccgcaggctgatcttcgctatcggaactagtagcaccaccggcgagtctgacaccgtgatttggaatgaagtgcatcacaaaaccgaattcggaagtaacctcaccggccatggctaccccgacgctaactatcttgataatgttctggcagagttagccgctcagggcatatctgaggattcgacggctcaggagaaggactag

SEQ ID NO: 31224 - DNA, 414 bp, synthetic construct
  source 1..414: mol_type = other DNA; note = Synthetic coding sequence
atgagctccgtgcagtcacaacaggagcaactgtcccagtccgacccttcaccatccccgaactcttgttcgagtttcgaactcatcgatatggatgcgggatccctgtatgaacctgtgagtccacattggttctactgcaagataatcgacagtaaggagacctggattccgtttaattctgaggacagccaacagctcgaggaggcctattcctccggcaaagggtgcaatgggcgtgtggtgccaaccgatgggggtagatacgatgtgcatctgggtgagaggatgcggtacgccgtctactgggatgaactggcaagcgaagtacgcaggtgtacgtggttttataagggagacaaggataataaatatgtcccctactccgagtctttctcccaggtactggagtag

SEQ ID NO: 31225 - DNA, 120 bp, synthetic construct
  source 1..120: mol_type = other DNA; note = Synthetic coding sequence
atgttttggaaatttgacttgcactcctcaagccacattgacacactcctagagcgggaggacgtgactctgaaggaactgatggatgaggaggacgtgcttcaagagtgcaaagcttag

SEQ ID NO: 31226 - DNA, 2157 bp, synthetic construct
  source 1..2157: mol_type = other DNA; note = Synthetic coding sequence
atgcttatgaccttggagatgacagaattgactgaccctcaccatactatgggagattataaagttgcccaccctcaggatccccaccatccttcagaaaaaccagtgattcattgtcataaatgcggggagccctgcaaaggagaagtgctgagggtgcaaactaagcactttcacattaaatgtttcacatgtaaagtatgcggatgcgacttagcacaaggcggattttttatcaagaacggcgagtatctttgtactctcgactaccaaaggatgtatggaacccggtgccatgggtgtggcgaatttgtggagggagaagtggtcacagccctcggtaagacctaccatccgaattgtttcgcttgtacgatctgtaaaagaccatttccaccaggcgacagagtcacgtttaacggccgagattgtctctgtcagctgtgtgcccagccaatgagctcctccccaaaggagacgaccttttcctctaattgcgccggatgcggcagagacattaaaaacggacaggccttgttagccctggataagcagtggcatctaggctgttttaagtgtaaaagctgtgggaaagtgttgaccggtgagtatatatctaaagatggtgctccctattgtgagaaggactaccaaggcctgtttggagtaaaatgtgaggcttgtcaccaattcatcactggcaaggtgctcgaagctggtgataagcattaccatccatcatgcgctaggtgttctagatgtaatcagatgttcactgagggggaagagatgtatctgcagggttcaaccgtgtggcaccctgactgcaagcagagcaccaagaccgaagagaagctgcggcctactcgaaccagctctgagagcatctattccagaccgggaagttctatcccagggagtccaggacacacaatctatgcgaaggttgataacgagattctggactacaaagacttagcagcgatccccaaggtgaaagcaatctacgatattgaacgaccggatctgatcacgtacgaaccattctatacatcggggtatgatgataagcaggaacggcagagtctgggagaatccccacggactctgtcacctactccctctgccgagggctatcaggatgtccgggaccgtatgattcaccgctcgacaagccagggcagcattaacagtccagtttactcaagacattcttacactccaacgacatcccgctccccccagcactttcatcgacccggtaatgagccgtcatccggtcgtaatagtccactcccctatagaccagatagtcgaccactgacccctacctacgctcaagcacctaagcattttcatgtgcctgatcaagggatcaacatctaccgcaaacccccaatctataagcagcatgctgctctggcggctcagagcaaatcatctgaagatatcattaaattcagcaaattccctgccgctcaggcgccagacccctctgagacccccaagatagaaactgaccactggccagggcctcccagctttgccgtggtggggcctgatatgaagcggcgtagcagtgggagagaagaggacgatgaggagctgctccggaggagacagttgcaggaagagcagcttatgaaactgaattctggactgggccagctcatcctgaaggaagaaatggagaaagagtctcgggaacggtcatctcttctcgcctcaagatacgatagtccgattaactcagccagtcacattccttcaagcaagactgcaagccttcccggttacgggaggaacgggctccatcgacccgtgtcaactgatttcgctcagtacaatagttacggggatgtctctggaggggtgcgcgactttcagaccctgcctgacggtcacatgcccgcaatgcgtatggatcgaggcgtaagcatgccaaacatgctcgagcctaaaattttcccttatgagatgctgatggtaacaaaccgaggcaggaacaaaatcctacgcgaggttgaccgcacccggttggagaggcatctcgctcccgaagtcttccgagaaatttttggtatgagtatccaggagttcgaccgtctgccgttatggagaagaaatgatatgaaaaagaaggccaagcttttttag

SEQ ID NO: 31227 - DNA, 2148 bp, synthetic construct
  source 1..2148: mol_type = other DNA; note = Synthetic coding sequence
atgtctcaatccggtgccgttagctgctgccctggtgcgactaacgggtcactgggccgatctgatggagtggccaagatgtccccgaaggatctcttcgagcagagaaagaagtactccaatagtaacgtgatcatgcacgaaacaagtcagtatcatgtccaacaccttgctaccttcattatggacaagagtgaggccatcacgagtgttgacgacgctattaggaagttagttcagctgtcctccaaagagaagatctggacccaggagatgctgctgcaggtcaatgatcagtccctacgcttgctggatattgagtcacaagaagagctggaagactttccgctgccgaccgtacagcgcagccagactgtgctgaatcagcttcgctatcctagcgtgctgcttttggtctgtcaggatagcgaacagagcaagccagacgtccatttttttcactgcgacgaagtggaggcagagctggtacacgaggacattgaatcagctctggccgattgccgactgggaaaaaaaatgcgacctcaaaccctgaagggccaccaggagaagatacggcagcggcagtccattctgccacctccacaggggcctgctcccatacctttccagcaccgcggtggggattcccccgaggccaaaaacagggtgggaccccaagttccgttgtctgagcctgggttcagacgacgcgagtcacaggaagagccgagggctgtgctggctcagaaaatcgagaaagagacccagatcttaaactgcgcactggatgacattgagtggtttgtggcaaggctccagaaggccgctgaggcgtttaagcagctgaaccagcgtaaaaaagggaagaagaaggggaaaaaggccccagccgaaggagtactcactctccgggctaggcccccaagcgagggagagttcatcgactgctttcagaaaattaaactggcaattaacctgctggcaaaactccagaaacacatccagaatcccagcgccgcagagctggtgcattttctctttgggcctctggatctgattgttaacacatgctcaggccctgacatcgctagatccgtgagctgtcccctgctgtcccgggatgccgttgactttcttagggggcatctcgtgcccaaggagatgtcactctgggagtcccttggagaatcctggatgcgaccccgtagcgaatggcccagggaaccacaggtacccctatacgtaccaaaattccactcaggctgggaaccccctgtcgatgtcctgcaagaggccccatgggaagtcgaaggcctggcctcagctccaattgaagaagtgtctcccgttagcagacaatccatacgtaactcccagaaacatagccctacaagtgagccaacccctcccggtgatgccctaccaccagtatcctccccccacacccaccgcggatatcaaccgacgcctgcaatggccaaatatgtgaagattttatatgacttcaccgcacgaaatgctaatgaattaagtgtccttaaagatgaggtcctggaggtgctggaagacggcagacagtggtggaagttgcggtccagaagcggacaagcaggatatgttccatgcaatatactgggcgaggctcgtccagaggacgctggagctcccttcgaacaggccggtcagaagtactggggtccagcaagcccaacccataaactgccgccttctttccctggcaataaggacgagctcatgcaacatatggatgaggtgaacgacgaactgataagaaaaatcagcaatatccgagcccaacctcagaggcatttccgcgtggaaaggagccagccggtcagtcagccactgacatacgagtcaggacctgatgaagtcagagcttggctagaggccaaggccttcagcccaagaatcgtcgagaacctgggcatcctcaccggccctcagctgttcagccttaacaaggaagaactgaaaaaagtgtgcggcgaagagggggtgagagtatatagccagctgaccatgcaaaaggcattcttggaaaaacagcagtctggaagtgagctcgaagagctaatgaacaagttccactctatgaaccaacgacgaggagaggattcatag

SEQ ID NO: 31228 - DNA, 360 bp, synthetic construct
  source 1..360: mol_type = other DNA; note = Synthetic coding sequence
atggagacagatctgaactcccaagatagaaaggacttggacaagttcattaagttttttgcacttaaaacggtgcaggtgattgtgcaggccaggctgggagaaaagatctgcactcggagctcttccagccccacaggctctgactggttcaacctggccattaaggatatccctgaagtgactcatgaggctaagaaagctctggcaggccaactgcccgcagtaggccgaagcatgtgtgtcgagatctctctgaagacatctgaaggtgatagcatggagcttgaaatttggtgtctagagatgaatgaaaagtgtgataaagaaatcaaggtgagttacactgtgtacaactag

SEQ ID NO: 31229 - DNA, 420 bp, synthetic construct
  source 1..420: mol_type = other DNA; note = Synthetic coding sequence
atggccgataccgatctgtttatggagtgcgaggaggaagagcttgagccttggcagaaaatctcagacgtcatcgaagactctgtcgtcgaggattacaatagtgtagacaagacaaccactgtgagcgtgagtcagcagccagtgtccgcaccagtccctatagcggcacacgctagcgtagcgggtcacctgtctacatcgactactgtctcgtccagcggagcccagaactctgacagcaccaagaaaaccctagtaacactcatcgccaacaataatgccggaaacccactggtgcagcaagggggtcaaccattaattctgactcaaaatccagcaccaggcttggggacaatggtgacacaacccgtgctaagaccagttcaggtgatgcagaacgccaatcacgtgacatag

SEQ ID NO: 31230 - DNA, 492 bp, synthetic construct
  source 1..492: mol_type = other DNA; note = Synthetic coding sequence
atgcacgacaaaggcatcactaccgccgcagtgtgcgtgtatcccgctcgcgtctgcgacgccgtgaaagccttaaaagcagccggatgtaacatcccggtcgcgagtgtagcagccggattccctgctggtcagacacatctcaagacccggctcgaggagattcgattagctgttgaggacggtgcgactgagatcgacgtggttatcaatcggtcgcttgtcctgaccggacagtgggaggccctgtacgacgaaattaggcaattccgaaaggcctgcggtgaggcccatttgaaaacaatcttggctaccggtgaactgggcaccttgaccaatgtatacaaagcgagtatgattgcaatgatggcaggctcggattttattaagacatccacaggcaaggaaacggttaatgcaactttccccgtcgccatagtgatgctccgggctattcgggatttcttctggaagacgggcaacaaagtttag

SEQ ID NO: 31231 - DNA, 456 bp, synthetic construct
  source 1..456: mol_type = other DNA; note = Synthetic coding sequence
atggctgataccgacctgtttatggagtgtgaagaagaagagctggagccttggcagaagatctctgacgtgattgaggacagcgttgtggaggattacaattccgtggataaaactactacggtctcagtgtcacagcaaccggtaagcgctccagttccaatcgccgctcacgcctccgtcgcgggacacctatccaccagtactacagtcagctcatcaggagcgcagaacagcgacagcaccaagaaaacactcgtgaccctaatcgcgaataataacgcaggaaaccctctggtgcagcaggggggtcagcctttgatcttgacgcagaatccagctcctggattgggaaccatggtgacgcaacccgtcttgaggccagtgcaggttatgcagaacgcaaatcatgtaacgtccagtcccgtagcgagccagccgattttcatcacctag

SEQ ID NO: 31232 - DNA, 252 bp, synthetic construct
  source 1..252: mol_type = other DNA; note = Synthetic coding sequence
atgtctcagtccggggcagtgagttgctgtcccggtgctacgaacggctcactgggcagatccgacggggtggccaaaatgtcccccaaggacctatttgaacagcggaaaaagtactccaactccaatgtgataatgcacgagacttcacagtatcatgtgcagcatttagccacatttatcatggataaaagcgaggcgataacaagcgtcgatgatgccatccgcaagttagtccaactttcctcttag

SEQ ID NO: 31233 - DNA, 366 bp, synthetic construct
  source 1..366: mol_type = other DNA; note = Synthetic coding sequence
atggctggccgtcccctgaggatcggggatcagttagttttggaagaggattatgacgaaacctacatcccatctgagcaagaaattctggagtttgcgcgagaaatcggaatagatcccattaaagagccggaactgatgtggctagctagagaggggatcgttgcccctttgccaggggagtggaagccctgccaggatatcactggggacatctactattttaattttgccaacgggcagtccatgtgggatcatccttgtgacgagcattatagaagcctggtgatccaggaacgggcaaaactatctacaagcggcgcaatcaaaaaaaaaaagaaaaagaaggaaaagaaggacaagtag

SEQ ID NO: 31234 - DNA, 2997 bp, synthetic construct
  source 1..2997: mol_type = other DNA; note = Synthetic coding sequence
atgaatcgccgacgcaaattcctccttgcctctgtcctggccctgcaaaacagctcattcatctacccttcttgccaaaaatgtttttcacgaattatcctggtctccaagcgatctaactgtcctaaatgtgggtccacgggcgagagtggtaacgcaaactaccgatacaagctgagtctcaaggtggctgaaagcaacaaactgttcgtgatcactgtattcgggagctgccttgacactttcttcggcctcaccgccaccggcttgcatcgttacattcaagaccctaacaagatccccgaaaccctcgacaatgatacaacacagaatctgttaaccaaggccgttgaaacatgttttgtgggacagtccttcatctttggagtcacaaacttcgagaaccagccaggccagggatccgacgcatccaactttctgcagcagtgctcagatcataaacgcaaggcaaaagcgctcgtagcgtgccaaatcgtcctgcccgaccccggtatagccggttttaccgtcatcgattatttccaccagctcctgcaaacgtttaattttagaaaactccagtgcgactcccaggctccaaataatcatttactggctcttgaccactccaattcagacttgtcttcaatatacacaagtgattcaacgtctgacttcttcaagagttgctcgaaagacacattcagtaagttctggcagccaagtctcgagtttacctgcatcgtcagccagctgacggacaatgatgatttttccgctagtgagcaatcaaaggcgttcgggacgctccagcagaaccgcaagtctatttccatcgctgaggccactggttcatcatcttgccacgaccctattcaggactcctggtcgctggtctcgtacatggataaaaagtctactgcagaaaagctggggaaggagctcggcttgcaggctaaggaactgagcgctgtccatagctcccaccacgagatcggtgtcaatgactctaacctgttctcactagaaatgagagagcctctggaatcaagtaataccaagagcttccactcagctgtggagataaagaaccgatctcagcacgagctgccctgttttcagcatcatgggatcgacacccccaccagtctccagaagcggagcgcgtgttgtcctcccagtctgcttaggcttgaggagaccgcaagctcttcccaggatggagacccccagatctgggacgacttgccgttctcagaatccctaaacaagttcctcgcagtcttggaaagtgagatcgccgtcacacaggcagatgtcagctcccggaagcaccacgtcgataatgatatcgacaagttccatgctgaccattcacggctttctgttacccctcagagaactaccggcgcactacacacacctccaatagccctgcgtagcagccaggtgatcgtcaaggcaaactgctccaaggatgacttcctattcaactgtaagggcaacctcagcccctcggtagagaaagagagtcagcccgataataaagtcgaagccgtgagcgtcaaccacaatggacgcgatatgtctgaatacttcctgccaaacccatacttgagcgctttgtcatcctcttcgaaggacctagagaccattgtgactttaaagaagacgatcagaataagcccgcaccgtgaatctgaccattcatcactgaacaacaagtaccttaacggctgtggggagatctctgtttcagaaatgaacgagaaattaaccaccctttgttatcgtaaatacaatgacgtctccgacctgtgtaagttggagaacaaacaatactgcaggtggagtaagaaccaagatgacagcttcaccatctgccgcaagctgacatatccactggagactctctgcaatagtcccaacagatcaacaaataccctgaaggaaatgccctgggggcatataaataacaatgtcacccagagttattcaatcgggtatgaagggagctacgatgcatcagccgatctgtttgacgacatcgccaaggaaatggatatagctacggagataaccaaaaagtcccaggacattctgttgaaatggggtaccagtctagccgagtcacatccatcagaatctgacttttctctgaggagtttgagtgaggacttcatccagcccagtcagaaactttcacttcaatcacttagtgattccaggcactcccggacctgcagcccgactccccatttccagtccgactcagaatacaatttcgagaactctcaagactttgtgccttgttcccagtctacccctatctccggctttcatcagactcggattcatggaatcaatcgggctttcaagaagccagtgttctattcagatttggatggtaactatgagaagatcaggatttttccagagaacgataagcagcaggcgtccccttcttgccctaaaaacatcaaaactccttcgcagaaaatcagatctcccatagtatctggggtgagtcagcccgatgtcttcaaccactacccatttgccgaatgccatgagaccgattctgatgaatgggtaccacctacgactcagaagatctttccttcagacatgctgggtttccagggtattgggctcggaaagtgcctggcggcataccatttccctgaccaacaggagttgcctcggaaaaaactgaagcacatacgacaggggaccaacaagggactgattaaaaagaagctgaaaaacatgctggccgcagtggtaaccaagaaaaaaactcacaaatacaactgcaagtcaagcgggtggatcagtaagtgccccgatatccaggtgttggccgctccccaactccacccaattctgggcccagactcatgtagtgaagtgaagtgctgccttcccttttctgagaaaggccctcccagcgtatgcgagaccagaagcgcttggagtccggagttgttctcctag

SEQ ID NO: 31235 - DNA, 504 bp, synthetic construct
  source 1..504: mol_type = other DNA; note = Synthetic coding sequence
atgggaactaccgctcccggacctatccatttattggagctgtgcgatcagaagctcatggaattcctgtgcaatatggataataaagacctggtgtggctggaagagattcaagaggaggctgagcggatgttcacccgggagtttagcaaggagcccgagctcatgccaaagactccctcccagaaaaataggcggaaaaagagacgaatcagctatgtccaggatgaaaacagagatccgatcagaaggagactctcgagaaggaagagccgatccagtcagctgagtagtcggaggctgcgatccaaagattccgtggaaaagctcgcaactgttgtgggggaaaacggaagtgtgctcagacgtgtgactagagctgccgcagccgcagctgctgctacgatggccttggccgctcctagctcaccgacccctgaaagccccacgatgctgacaaagaagcctgaggataaccacacccaatgccagttagtgccctag

SEQ ID NO: 31236 - DNA, 615 bp, synthetic construct
  source 1..615: mol_type = other DNA; note = Synthetic coding sequence
atggaggcacaggctcaggggctactggagaccgagcccctacagggcacagatgaggacgccgtggcgtctgcagacttctcctctatgctctccgaagaggagaaggaggaactgaaggcagaactggtgcagctagaggatgagatcaccacactccggcaagtgctgagtgccaaggaacggcatctcgtggagataaagcaaaagttaggaatgaatctaatgaatgaattgaagcagaactttagcaagtcatggcacgatatgcaaacgactacagcttataaaaagacacatgagactcttagccacgccggtcagaaggcaacagcagcctttagtaatgtcggaaccgctatctctaagaaatttggagatatgagttattcaatccgccattcgatctctatgccagcaatgcgaaattcccccacttttaaatcgtttgaagagagggtcgagaccacagttacaagcctgaaaaccaaagtgggcggtactaacccgaacggcggaagttttgaagaggtgctgagctccaccgcccatgccagcgcccagtccctggctgggggttctcgtagaactaaagaagaagagctccagtgctag

SEQ ID NO: 31237 - DNA, 1023 bp, synthetic construct
  source 1..1023: mol_type = other DNA; note = Synthetic coding sequence
atggccgctgctcgggaccctccagaggtgagcctgcgagaagccactcagcgcaagttacgacgattttccgaactgagagggaaacttgttgccagaggagagttctgggatatcgtggcaattacagctgccgacgagaagcaggagttggcctataaccagcagctgagcgaaaagctgaagagaaaggagcttcccctgggagtgcaataccacgtctttgttgaccccgcaggtgccaagattggtaatggaggaagcaccttatgtgctttgcagtgtctggagaagctgtacggcgacaaatggaattctttcaccattctgttgatccacagtgggggttattcacagcgcctgcccaacgcctccgcacttgggaaaatctttacagctctcccattggatatccccgaatgttccgggaagacttcatgcattattcagagtatactggacagccggtgtagcgtggctcccggatccgtcgtggaatactctcgactcggaccagatgtctctgttggagaaaattgcatcatctctggaagctatattttgaccaaagcggcactcccagctcactccttcgtttgttccctgagcctgaaaatgaatcgatgcctgaaatatgccacgatggcattcggcgtgcaggataacctgaaaaaaagtgtcaagaccctctcagatatcaagctcctccagtttttcggggtgtgcttcctctcatgcttggacgtgtggaacctgaaagttacggaagagctcttcagcgggaacaagacttgtttatctctgtggaccgcacgtattttccctgtgtgttcttcactgagtgattcagttattacaagtctgaaaatgctgaacgcagtcaaaaataaatctgccttctctttgaactcctacaaattactgtctattgaggagatgttgatttacaaagacgtcgaggatatgatcacctaccgtgaacagatatttcttgaaatttcactgaagagctcacttatgtag

SEQ ID NO: 31238 - DNA, 873 bp, synthetic construct
  source 1..873: mol_type = other DNA; note = Synthetic coding sequence
atggccgaattgaccgctttagagagtttgatcgagatgggcttcccaaggggacgagcagaaaaggctctggccttgacaggaaatcaggggatagaagctgcaatggactggctgatggagcatgaagatgaccctgatgtggacgaaccattggaaacacctctggggcacatcctgggccgtgagcctacctcctccgagcagggtggtctggagggctccgggtctgccgcaggcgaaggcaagccagccctgtctgaagaagaacgacaggaacagacaaaaaggatgctggagttagtggctcagaagcagagagagagagaggaaagggaggagagagaggccctggagagggaaagacagaggcgccgacaggggcaagagctcagtgctgccagacaaagactgcaggaagacgaaatgcggagagctgcggaagagaggcggagggaaaaggctgaggagctagctgctcgtcaaagggtgcgagaaaagattgagcgagacaaggccgaaagggctaagaagtatgggggaagcgtggggagtcagcccccaccagtggcacccgaacccggtccagtcccctcaagtccttcacaggagcctcctaccaagagggaatatgaccaatgtaggatacaggtgaggttgcccgatggtacttccctcacccagacgtttagggctcgggagcagttagccgctgtccggctgtacgtggaattgcaccgtggagaagagctgggaggcggtcaggaccctgttcaactcctgagtggttttcccagaagggccttcagtgaggccgatatggagcggcctctgcaggaacttggactggtaccgtcggcagttttgatctag

SEQ ID NO: 31239 - DNA, 309 bp, synthetic construct
  source 1..309: mol_type = other DNA; note = Synthetic coding sequence
atgctcagtgaagaggaaaaggaggaactcaaggccgagctggtacagttagaagacgaaatcaccaccctacgccaggtgttatcggccaaggaacgccatctggtcgaaatcaagcaaaagttggggatgaacctgatgaatgagctcaaacagaacttcagcaaaagctggcatgatatgcagacaactactgcctacaagaaaactcatgagaccttgtcccatgcgggtcaaaaggccactgccgcttttagcaatgtggggaccgctatttctaaaaagtttggggacatgcgtcggaagtag

SEQ ID NO: 31240 - DNA, 279 bp, synthetic construct
  source 1..279: mol_type = other DNA; note = Synthetic coding sequence
atgctgtctgaggaggaaaaagaagaattaaaagccgagctggtgcagttagaagacgaaataactactctcagacaagtcctaagcgccaaagagagacacctggttgaaatcaagcagaagctgggcatgaatctgatgaatgagctgaaacagaatttttctaagtcatggcacgatatgcagacgacaacagcctataaaaagacacatgaaacactatcccacgccggacaaaaagccacagcagcattttcaaacgtcgggacagccatttag

SEQ ID NO: 31241 - DNA, 3735 bp, synthetic construct
  source 1..3735: mol_type = other DNA; note = Synthetic coding sequence
atgctcatcaaggaatatcacatactgctgcccatgagtttggatgaataccaggtcgcacaactttatatgatccagaagaagagcagagaagagtcatctggcgaaggaagcggtgtggaaatcttagccaacagaccgtacactgacggtcctggtggcagcgggcagtatacccacaaagtgtatcacgttggatcacacatccccggatggtttcgtgctttgttgcccaaagcagcattgcaggtagaggaggaaagctggaatgcttacccgtacacacggactcgctacacatgcccatttgtcgaaaagttctcgatcgagattgagacatactaccttcccgacgggggtcagcagcccaatgtttttaacctctccggggctgaacggcgtcagagaatcctcgacacgattgacatcgtgagggacgctgttgcgccaggcgagtacaaggccgaggaagatccaaggctgtatcattcggtgaagaccggtcgaggtcccctctctgacgactgggccagaactgccgcacagaccggcccactgatgtgcgcgtacaaattatgtaaggttgaattccggtactggggaatgcaggccaagatagaacagttcatacacgacgtgggcctaaggagggtaatgttaagagctcataggcaggcatggtgctggcaagacgagtggaccgagctcagcatggctgatattagggctctggaagaggagactgccagaatgttggcccagaggatggctaaatgcaacaccggttctgaaggatccgaggctcaacccccagggaaaccctctacggaggcccgttccgccgcttcaaatacgggaacaccagatgggccagaggcgcctcctgggccagatgcatcgcccgacgcatcctttggcaagcagtggagctcttcatctagatcttcttactccagtcaacacggcggtgcggtttccccacagagtctttccgagtggagaatgcagaacatcgcacgcgatagcgagaacagtagtgaagaagagtttttcgatgctcacgagggattcagcgacagcgaggaggtgttcccaaaggagatgacgaaatggaatagcaatgatttcatcgacgcatttgctagtcctgtcgaggctgaaggtactccagagccgggtgcagaggcagcgaagggaatagaagatggtgcacaggcccctagagacagtgaagggctcgatggagccggtgagctgggagccgaggcttgtgccgtccatgctctctttctgattctccattcggggaatatcctagactcaggtcccggtgacgctaactccaaacaggcagacgtgcaaaccttgagctcagcctttgaggccgtcactagaattcacttccccgaggccttgggccacgtggccctcaggttagttccatgtcccccaatctgtgctgcagcttatgccttggtgagcaacctgtctccgtactcccacgacggagacagccttagtcgcagccaggatcacatccctctggctgctcttcccctgctggctacttctagtagtcggtatcagggcgcagtcgctacggtcattgcgcgtactaatcaagcatattctgcgttcttacgctccccagagggcgctgggttctgcggtcaggttgccctcataggcgacggcgttggcggtattctaggcttcgacgctctgtgtcacagcgccaacgccggaacaggctctagaggttcctcccggaggggctccatgaataacgaactactatcacccgaatttggtcccgtgcgcgatcccctggccgacggggtcgaaggcttggggagggggagcccggaaccaagcgctttgccaccacagagaattcccagtgacatggcctcccctgaaccagaaggatcacagaattccctgcaggccgctccggcaaccacaagctcatgggaacccaggagagcctcaacggccttttgtccaccagcagccagtagcgaggccccagacgggccttctagcactgctcgcctcgatttcaaagtttccggctttttcctttttggctctcctctaggattagtcctcgcattaaggaaaaccgtgatgcccgcactcgaggccgcacaaatgcggcctgcctgcgagcaaatttacaatctttttcacgcggctgacccgtgcgcttctagactggagcccctgctagctcctaagtttcaggcaatcgcgccactgactgtgcctagatatcagaaattcccacttggtgacgggtcttctctgctacttgcagatacactgcagacacactcttcgctcttcttggaggagctagaaatgctggtccccagtacgcctactagcaccagtggggcattctggaaaggaagtgagctcgccaccgacccaccagcccagcctgctgccccaagcaccaccagcgaagtcgtgaaaatactggaacggtggtggggcaccaaacgaatcgattattccctgtattgccccgaagccctcacggctttccctaccgtgacccttccacacttattccacgcatcttattgggagagcgccgatgtggttgcattcatcctgcgtcaggtcattgagaaagagaggcctcaattggccgagtgcgaggagccctcaatctacagccctgccttccccagggagaagtggcaacgtaagcgcacccaggtcaagattcgcaacgttaccagcaatcatcgggcttcagataccgtggtttgcgagggcaggccacaggttctgagcggcaggtttatgtacggacccttggatgtcgtgacactgaccggtgagaaggtggacgtatatatcatgactcagcccctatccggaaaatggatccacttcggcactgaggtcaccaacagctccggtaggctgaccttccccgttcccccagagagggcactgggaatcggcgtctacccagtgcgcatggttgtcagaggtgatcatacctacgcagaatgctgtcttacagtcgtcgccaggggcactgaggccgtggttttctcaatcgacggctcttttaccgctagcgtgtccatcatgggatcagacccaaaagttcgggctggagctgtggacgtggtgcggcactggcaggactcaggatatttgatcgtgtacgtcactggcaggccggacatgcagaagcatcgggtggttgcttggctgtcgcagcataactttccacacggcgtggtaagcttctgtgacgggctgactcacgacccactccgccagaaggctatgtttctgcaatccttagtgcaggaggtggaactaaatattgtagccggatacgggtcaccaaaagacgtggccgtatatgcagccctgggcctgtccccttctcagacctacatcgtggggcgagccgttagaaaactgcaggcacagtgtcaattcctctccgacggctatgttgcccatctgggccagctggaagcgggaagccactcccatgcgtcctctggaccaccgcgagccgcattgggtaagagcagctatggagtggccgctcccgtagactttctccggaagcagtcccagctgctaaggagccgaggacctagccaggccgagagggagggccctggtaccccaccgaccactctagcaaggggaaaggcgaggtccatatcccttaaactggatagtgaagagtag

SEQ ID NO: 31242 - DNA, 2676 bp, synthetic construct
  source 1..2676: mol_type = other DNA; note = Synthetic coding sequence
atggaccagcccgaagctccatgttccagcacaggacccagacttgcggtggcccgagagctgttgcttgccgcattagaagaactgtcccaagaacagctcaagaggtttcgccacaaactacgcgacgttggcccagacggacgatctatcccctggggccgactggagagggcagatgctgtggacctggccgagcagctcgcccaattttacgggccagaacccgctttggaggtggcacgaaaaaccttgaagcgcgctgacgctcgtgacgttgctgcacagctgcaagagcggcgactgcagagacttggacttgggtcaggcaccctcttgagtgtctctgagtacaagaaaaagtatcgagaacacgtactgcagctgcatgcccgagtcaaggagcgtaacgcgaggtcggtcaaaatcactaagcggttcacgaaacttctgatagcccctgagtcagccgctcccgaagaggccatgggacccgctgaggaacccgaacctggacgcgctagacgatccgatacgcatacatttaatcggttgtttcggagggacgaggaggggaggcgtcctcttactgtcgtgctgcagggcccagcaggaatcgggaagaccatggcagccaaaaagatcctgtatgattgggcggcaggaaagctctatcaaggacaagttgattttgcatttttcatgccgtgcggggagctgctcgaaagacccggaacaagaagtctggccgacctgattttggaccaatgtcccgatcggggagccccagtgccgcagatgctagctcagccgcagcgcttgctattcattctggatggagctgatgagcttcctgcactgggcggaccggaagcagctccttgtaccgatcccttcgaggccgcttctggggcacgtgtgctcggaggcttgttgtctaaagctctgctacccactgcattgctgttagtcacgacgcgcgctgcagctccgggaagactccaggggagactttgttcaccgcagtgtgctgaggtgaggggatttagcgacaaggacaagaagaagtacttttataaatacttccgcgatgaacgtcgggcagagagggcgtaccgctttgtgaaagaaaatgagacactgtttgccctttgttttgtgccctttgtctgctggatcgtctgtactgttctgcggcagcagctggagttgggacgggacttgtctcgcacttctaaaaccactacttctgtgtacctgctctttattacatctgttctctcctcagctccagtcgccgacggcccaaggctgcagggggacttacggaatctttgtcggttggctcgggagggtgtgttgggccgtagggcccaatttgctgaaaaggaattggagcagctcgagttacgagggtccaaggttcagacattgtttctatctaagaaagaactgcccggagttctcgagaccgaggtcacctatcagttcattgatcaatcattccaggaattcctggccgctctttcttatctgctggaagatggaggagtgcctaggaccgccgcaggcggagtcggcactctgctgcgcggagacgctcagccccactctcacctggttcttaccacacgattcctctttgggctgctcagtgcagagcgaatgcgcgacattgagaggcacttcggttgtatggtgtccgagagggtaaagcaagaagcgttgaggtgggtccaggggcaaggacagggatgccccggagtagccccagaagtcactgagggagcaaagggcttggaggacacagaggagccagaggaggaagaggaaggcgaggaacccaattaccccctggaattactgtactgcctttatgaaacacaggaagacgctttcgtcaggcaggccctgtgccggtttccagaactcgcgttgcaacgcgtacgcttctgcaggatggacgtcgccgtcctgagctattgcgtgcgctgctgccccgctggacaagcgctgcggcttatctcatgccggttggttgccgcacaggagaaaaagaaaaaatctttagggaaaaggctccaggcctccctgggcggaggatcctcccaggggacaacaaaacagctgcctgcctcactccttcaccccttatttcaggcaatgactgacccattgtgccatctaagctctctgactctgagtcactgtaagctgccagacgcagtatgcagagacttaagcgaagccctgcgggctgctcctgcacttaccgagcttggcctgctccacaaccgattatctgaagccggtctgcggatgctctcagagggactcgcgtggccgcagtgtcgcgtgcagaccgtgagggtacaactcccggaccctcaaaggggtcttcagtacttagtcggcatgctgagacaaagccctgctctgacaacattggatttgtctgggtgccaactgccagcacccatggtcacatatctgtgcgcggtgctgcagcaccaggggtgcggactgcagacactaagtttggcctcggttgagctctctgagcagtcactgcaggagctccaagccgtaaagagggcgaaaccggaccttgtgatcacgcaccctgcactagatggtcatccccagcctccaaaggagctaatcagcactttctag

SEQ ID NO: 31243 - DNA, 240 bp, synthetic construct
  source 1..240: mol_type = other DNA; note = Synthetic coding sequence
atgtctcagagcggagccgtatcttgctgcccgggagcaactaacggatcattgggcagatctgatggagtcgcaaagatgagccccaaggacctgttcgagcagcgaaagaagtactccaattccaacgttataatgcatgagacatcgcagtatcatgtccagcatctcgcaaccttcataatggataagagcgaggcaatcaccagtgtagacgatgccatccgaaaactggtctag

SEQ ID NO: 31244 - DNA, 543 bp, synthetic construct
  source 1..543: mol_type = other DNA; note = Synthetic coding sequence
atgggagataaaaagagtcccactcggcctaagagacagcccaagccatccagtgacgagggctattgggattgcagtgtctgtacatttcggaactccgccgaggcctttaagtgtatgatgtgtgatgtgaggaaaggaactagtaccaggaaaccgagaccagtgagtcagctggtcgcccagcaggtcacccaacagttcgtgcctcctactcagagcaaaaaagagaaaaaggacaaggtagaaaaagagaaaagcgaaaaagagactacatccaagaagaacagccataagaaaaccagacctcggctgaagaacgtggatcgctctagcgcccaacacctggaagttaccgttggggatctcactgtgataatcacagactttaaagagaaaaccaagagtccacccgcttcctccgccgcaagcgccgatcagcattcgcagagcggttcctcgtctgacaatacggagcgcggtatgtctcggtccagctcccccagaggcgaggcctcaagcctgaatggcgaatcacactag

SEQ ID NO: 31245 - DNA, 2196 bp, synthetic construct
  source 1..2196: mol_type = other DNA; note = Synthetic coding sequence
atgggcagtggcgaggaaccaggccagtctggcgcatcactgaggactggccctatggtccagggcagaggaatcatgaccaccgggtctggccaagaacctggccaatctggcaccagcctccgaaccgggccaatgggcagcctgggccaagccgaacaggtctccagtatgcccatgggatcactggagcacgagggactggtcagcctccgcccagtgggcttacaagaacaggaggggccaatgtcacttgggcctgtgggctctgccggtccggtagagacatccaaagggctactgggacaggaaggcctagtggaaatcgccatggactctccggagcaagaaggcctcgtcggtcccatggaaattaccatgggatccttggaaaaggccggacctgtgtcaccgggatgtgtcaaactggctggccaggagggtctcgtggagatggtgctccttatggaaccaggagctatgcgtttcttgcagctataccacgaagacttgctggctggcctgggggacgtggcccttcttcctctggagggtccggatatgaccgggtttcgcctctgtggcgctcaagcatcatgtcaggccgctgaggaattcctccgctcactgctaggatccatcagctgtcacgtcctctgcctcgagcaccccggttccgcaaggttcttgttgggacccgagggccagcatctgctgcagggtttagaggcacagttccagtgtgtattcggaactgagcgcttagcaaccgctacgcttgataccgggctagaggaggtcgatccaaccgaagccttaccggtgctgcctggaaacgcccacacattatggacgccagattctaccgggggagatcaggaagacgtgtccttggaagaagtgcgagagctcctggccacgctggagggcttggatttggacggagaagattggctgccacgcgagctggaagaagagggccctcaggagcaacccgaggaagaagttactcccggacatgaggaggaggagcccgtcgccccatccactgtcgcgcctcgttggctcgaagaggaagctgcccttcagttggccctacacaggtccctggaaccgcaggggcaggttgcagaacaggaagaagccgctgccctgagacaggcccttacattgtcactcctcgagcaacctcctttggaagccgaggaacctcctgacggtggaacagatggcaaggcccagctggtggtacattcggcctttgagcaggacgtagaggaactggatcgcgcactccgggcagccctggaggtgcatgtgcaggaggaaactgtaggcccatggaggcgcaccctgcccgcagaattgcgcgctaggttggagcggtgccacggtgtgtcagtcgcccttagaggagattgcaccatactgcgcggattcggtgcgcaccctgcaagagctgccagacacctggttgccttattggcgggtccctgggaccagagcctggccttccctctagccgcatctggccctactcttgcaggacagacgctgaaaggcccttggaacaacttggagcggctggccgaaaataccggtgagtttcaagaagtggtccgtgccttttatgacacccttgacgctgccagatctagcattcgggtcgtcagggtggaacgtgtgtcccacccccttttgcaacagcagtatgagctgtacagggaacgcctgctgcagagatgtgagcgaaggcctgttgagcaggttttatatcatggtactaccgccccagcagtcccggacatctgcgcccacggtttcaataggagcttttgcgggaggaatgcgaccgtgtacgggaaaggcgtttattttgcccgaagggcctccctcagtgtccaggatcgatatagccctcctaacgcggacggacacaaagcagtgttcgtagcacgcgtcctcaccggcgactacgggcagggcagacgcggtctaagagccccacctttgcgcggacccggacacgtgctgttgagatacgactcggccgtcgattgtatatgtcagccatcaatatttgtcatctttcacgacactcaggcactacccacccacctgatcacgtgtgagcatgtccccagagctagtccagacgacccctccggcctgcccggtcgatcccctgatacatag

SEQ ID NO: 31246 - DNA, 1083 bp, synthetic construct
  source 1..1083: mol_type = other DNA; note = Synthetic coding sequence
atgcaggtttacgagggactcgacatcataacaaacaaggtgtccgcacaggagcagcggatctgtcggcaccacatgattagcttcgtcgaccccctggtaaccaattataccgtggtggattttcggaatagggccactgcattgatatatttgcccgaaaccaagtttctgctgctgtgggaggagccaatcattaccctcaacctttgcagtggcaaattcctgtctatcccccgatctttgcaggtgttcgaggaaaccggaatctcacactctgagttcctgcatcgacaacatactgaagaggggggaggccctctcggcggaccactgaaattctccaatccttgtattctgtggctacatgctgatcaagccgtgctcgacgaaaggctggacaaacgggtcgacgatatgttagcggcagggcttctggaagaactgcgggacttccaccgcaggtacaaccagaagaacgtgtccgaaaactcccaggattatcagcatgggatttttcagtcgatagggttcaaggagttccacgagtacctgatcacagaagggaaatgtaccctcgaaaccagtaatcaacttcttaaaaaggggattgaagcccttaagcaagtgacaaagaggtatgcccgaaaacagaacaggtgggtgaaaaatcgctttttgtcaagacctggacccatcgtcccccctgtgtatgggttagaggtgtctgacgtatccaagtgggaggagtccgtgttagaacctgcactggaaatagtacagtctttcattcagggccataagcctaccgccactcccattaagatgccctataatgaggctgaaaataagagatcttaccacctatgcgatctctgcgacagaatcatcatcggagaccgggagtgggcagctcacattaagtcaaagagccatctgaatcagctgaaaaagaggcggagactggatagtgacgccgtgaacacaatagagtctcagagtgtatccccagaccataacaaggagccaaaggagaaaggatcaccaggacagaacgatcaggagcttaagtgttccgtctag

SEQ ID NO: 31247 - DNA, 828 bp, synthetic construct
  source 1..828: mol_type = other DNA; note = Synthetic coding sequence
atgtccgctgaagtgaaggtgactggtcagaaccaggagcagtttttgttgctggccaagagcgccaagggcgctgccctggcaactctaatccaccaggtgctggaagcaccaggcgtctatgtgttcggtgagctcctggatatgccaaatgtccgagagctggccgagagcgatttcgccagtacctttcgcctcctgaccgttttcgcatatggaacttacgccgattacctggccgaagctagaaatctcccgcctctcaccgaagcgcaaaagaacaaactgaggcaccttagcgtcgtgactctggctgcgaaagttaagtgcattccatacgccgttttgcttgaggctctcgcccttcgcaacgttcgacagctcgaagaccttgtcatcgaggccgtatacgcggatgtgctgcgaggaagtcttgatcagagaaaccaacgcctggaagtggactattccatcggaagagatatccaaaggcaggatctgtctgctatcgctagaaccctgcaggaatggtgcgtcgggtgcgaagtcgtcctttctggcattgaggaacaggtcagcagagcaaatcagcacaaagagcagcaactggggttgaaacaacagatcgaatctgaggtggctaatctcaaaaagaccatcaaagtcacaaccgcagccgcagccgcagccacatcgcaagacccggagcagcatttaacagagctgcgcgaaccagcccctggaacaaatcagcgccagcccagcaaaaaagcctctaagggcaaagggctcagaggtagtgccaaaatctggagtaaatccaattag

SEQ ID NO: 31248 - DNA, 1692 bp, synthetic construct
  source 1..1692: mol_type = other DNA; note = Synthetic coding sequence
atggagaccgcgaaacagaaggccctcgaggtcgctaatagactttaccaaaaggatctgcgcgcaccagacgtggtcattggcgctgacaccatcgtgacagtcggaggactcatcctggaaaaacccgtggacaagcaggacgcctaccgtatgttatcccggctgagtgggagagagcactcagtgttcaccggggtcgcaatagttcattgcagttctaaggatcaccagttggatactagggtaagcgaattttatgaggagaccaaagtgaaattcagcgagctgagtgaagagctgctttgggagtatgtgcattcgggggaaccgatggataaggcaggtggctatggcattcaggcgttaggaggaatgcttgtcgagtcagtgcatggtgacttcctcaatgtggtgggctttccactaaaccacttctgcaagcaactggttaagctttattatccacccaggcccgaggacctgagacgtagcgtcaaacatgactccatcccagctgctgataccttcgaagacctgtcagatgtggagggaggtggctctgaacctacacagcgggatgcaggttcaagggatgaaaaggccgaggccggtgaggccggacaggccacggcagaggccgagtgccatcggactagggaaaccctccccccttttccgacccggctgctggagctcatcgaaggattcatgctgtcaaaggggctattgaccgcatgtaaactcaaggtctttgatctgctcaaggatgaagccccacaaaaggcagctgacatcgcctcgaaggtggacgcttcggcctgtgggatggagcgtctactggacatctgcgctgctatgggtctcttggagaagacggagcagggttacagtaacaccgagacggccaacgtttaccttgctagcgatggcgagtactctctacatggctttattatgcacaataacgatcttacctggaacctgttcacttaccttgagtttgccatacgagagggaactaaccagcaccacagggcactgggaaaaaaggcagaagatctctttcaagatgcatactaccagagccccgaaacccgcctgaggttcatgagagcaatgcacgggatgactaagctgactgcttgccaggtggcgacagcctttaacctgtcccggttctcttccgcctgcgacgtgggaggatgtacgggagctctcgcaagagaattggccagagagtacccaaggatgcaggtgacagtatttgatctccccgacatcatcgaacttgccgcacatttccaacctccaggcccacaagctgtgcagattcattttgccgcaggtgacttcttccgggaccccctgccctccgcagagctctatgtgctgtgcaggattctccatgattggccagacgataaagtgcacaaactcctgtcacgggtggcagaatcctgcaaaccgggagccggactcctgttagtcgagacactccttgacgaagaaaagcgggtggcacaacgggctctcatgcagtcactgaacatgctggtacagaccgaggggaaagagcgcagcctcggggaataccagtgcctgctagaactccacggtttccaccaggtccaggttgtgcatctgggtggggtgttggatgctatcttggcaaccaaggtcgccccttag

SEQ ID NO: 31249 - DNA, 828 bp, synthetic construct
  source 1..828: mol_type = other DNA; note = Synthetic coding sequence
atgagcgcagaggtgaaagttacaggtcagaaccaggaacagttcttactgcttgcaaagtctgctaaaggcgcagcactcgctaccctgatccaccaggtgctcgaggcgccaggcgtgtacgtcttcggggagctgctggatatgccaaatgtgagggaacttgccgagagcgattttgcctcaactttcagactcctgacagtgtttgcgtacgggacctatgccgattacctggccgaagcaagaaacctgccacctctcaccgaggctcagaagaacaaactgaggcacctgtccgtggtgactctggctgctaaagtgaagtgcatcccctatgctgttctgctcgaggcactggccctacgaaatgtgagacagctggaggatttggtgatcgaggctgtgtatgcggatgtgctgcggggttccctggaccaacgaaaccaaagactcgaggttgactattccatcggccgtgacatccagcgtcaggacttgagcgctatagcacgcaccctgcaggagtggtgtgttggctgtgaggtggtgctctccggcatagaggaacaggtaagtagggctaatcagcataaagaacaacagctcggcctaaaacaacagatcgaatcagaagttgctaacctgaaaaagaccatcaaagtgaccaccgccgctgcagccgcagccacttctcaagaccccgagcagcacctgacggaactgcgagagcccgcacccggaacaaaccaacgtcagccctccaagaaagctagcaaagggaagggcctcagggggtccgccaagatttggtctaaaagcaactag

SEQ ID NO: 31250 - DNA, 999 bp, synthetic construct
  source 1..999: mol_type = other DNA; note = Synthetic coding sequence
atggaatatcttggcggtgggtcagcgcttgacctgctgaaaccgggaccgttggaagaaacttatattgctactatcttgagggagatcttaaaggggctcgattaccttcactccgagagaaaaatccacagagacataaaggccgcaaatgttctgctgtccgaacaaggggatgtcaagcttgcagactttggagtcgctgggcagttgacagacactcagataaaacgaaacacgtttgtgggaacccccttctggatggccccagaagtgatcaagcagtcagcctacgactttaaggccgatatctggagcctgggcatcaccgcgatcgaattggcaaaaggcgaacccccaaactctgacctacatccaatgcgggtgctatttttaattccgaagaatagcccccctactttagagggacaacatagtaaaccgttcaaagagttcgtagaggcgtgccttaacaaggatcctcgatttcgcccaacagccaaggaactgttgaaacacaagtttatcacccggtatactaagaaaacctcctttctgacggaactcatagaccgctacaaacggtggaagagcgaggggcacggtgaagaatctagttctgaggattcagacatcgatggggaggccgaggatggcgagcagggaccaatctggacctttcctccaaccatacgcccttctccacatagcaaattacacaagggaactgctctgcactcgagtcagaagcctgccgagcctgtcaagcgccagccaaggagtcagtgtttgagcactctggtcaggcctgtgttcggcgagctgaaagagaagcataagcagagcggcggaagcgttggtgcgcttgaagaactggagaacgcattttctctggccgaagagtcctgtcccggtatatccgataagcttatggtgcatttggtcgagagagttcaacgcttctcacataacagaaaccacctgaccagcacccggtag

SEQ ID NO: 31251 - DNA, 279 bp, synthetic construct
  source 1..279: mol_type = other DNA; note = Synthetic coding sequence
atgaatttcacaccaactcatacccccgtgtgccgaaaaaggacagttgtctccaagaggggcgtcgccgtgtcaggtccaactaagagacgcggtatggccgactcgctcgagtcaaccccattgccctcccctgaggaccggcttgctaagctgcacccttctaaagaacttctagaatattatcagaagaaaatggcggagtgcgaggccgaaaatgaggacctcctgaagaaactggaactgtacaaggaagcatgtgaagggcagcacaagtag

SEQ ID NO: 31252 - DNA, 429 bp, synthetic construct
  source 1..429: mol_type = other DNA; note = Synthetic coding sequence
atggctcagaaagagaactcctatccatggccttacgggaggcagacagctccaagtggtctgagtaccctcccacagagagtcctgagaaaagaacccgtgacccccagcgcactggtcttgatgtctcgtagcaacgtacagcccacagccgctcctgggcagaaagttatggaaaattccagcggtacacctgacatcctgacgcggagacacttcacaatcgatgatttcgaaattggacggccacttgggaaagggaaatttgggaatgtctacctggccagggagaagaaaagccacttcattgtggccctgaaagtgctgtttaaatctcagatagaaaaggagggagtggagcaccagttgaggagagagattgaaatacaggcacaccttcaaagttggagaagctggcagatgctgtag

SEQ ID NO: 31253 - DNA, 501 bp, synthetic construct
  source 1..501: mol_type = other DNA; note = Synthetic coding sequence
atggatcaagaggatagcgagagcaagactgtgtccgagcatggggaacgagactggatgacagctaagaagttctggaagcctggcgattcactcgccccaccggaggtggattttgacagactactggcgtctttgcaggatctgtctgagctcgtcgtcgaaggggacacccaggtgacacctgtccccggtggtgccagactgcggacgctggagccgatccctcttaagctttaccgcaacggaattatgatgtttgacggaccttttcagccattctatgacccctccacacagaggtgcttgagggacatcctagatgggttcttcccctccgagctgcagcggttgtatccgaatggagttcccttcaaagtgatcagctgtagcagtaaccatacattcggtgacttcgaaggaagtggagatactcagcccccacagactcccccaatactccgcggttctagatgtactccctggggcactccagtgtag

SEQ ID NO: 31254 - DNA, 1473 bp, synthetic construct
  source 1..1473: mol_type = other DNA; note = Synthetic coding sequence
atgcagtctcttgatgatgctactaaacaactcgatttcacaagaaaaacgctcgctgagaagaagcaggagctagataagctccgcaacgagtgggcctcacatacagcagcactgaccaacaagcattcccaagagctgaccaatgagaaagaaaaagctctccaagctcaggtgcaatatcagcaacaacatgagcaacagaagaaggacctggaaattctgcatcagcaaaatatacaccagctacaaaacaggctgtctgaactagaggctgccaataaggatctgaccgaaagaaagtacaagggcgattctactatccgagagttgaaggcgaagctaagcggcgtagaagaagaactgcaaagaactaaacaggaagttctcagtctgaggcgagagaacagcacactcgatgtagagtgccacgagaaggaaaagcacgtcaaccagcttcagacaaaagtggccgtcttagaacaggagataaaagataaagaccagctggtgctcagaaccaaagaggcatttgatacaatccaggagcagaaggtggtgctggaggaaaacggcgagaagaatcaggttcagttagggaagttagaagccactataaaaagtctgagcgcggagctgctcaaagctaatgaaatcattaaaaagctacagggagacctgaagaccctcatgggaaagttaaagttgaagaacacagtgacgattcagcaagaaaagctgttagcggaaaaagaggagaaactgcagaaagagcagaaggagttgcaggatgtggggcagagcctgcgaatcaaggaacaagaggtgtgtaaactacaggagcagttagaagctactgtgaaaaaattggaggagtccaagcagctgttaaaaaataatgaaaagctgattacctggctgaacaaagaattgaacgaaaaccagctggtgagaaagcaggacgtcctcggaccatccaccactccccctgcccatagtagctcaaataccattcgcagtggcatatcccctaacctgaacgtcgtggatggcagactgacctacccaacatgcggaataggctacccggtctcttctgcgttcgcctttcagaacacctttccccactctatttccgcgaaaaacacttctcaccctgggtctgggacaaaagtgcagtttaacttgcagtttacgaagccaaatgcaagcctgggcgatgtccagtccggcgcaacaatctccatgccttgttcaacagacaaagagaacggggagaatgtgggactggagagcaagtatttgaagaaacgggaggactccatccccctgcggggtctgagccagaatctgttttctaatagcgatcaccagagggatggaactttaggagcactgcatacaagcagcaagccaaccgccctgcccagcgcttcttcggcgtacttccccggacagctgcccaactcgtag

SEQ ID NO: 31255 - DNA, 3015 bp, synthetic construct
  source 1..3015: mol_type = other DNA; note = Synthetic coding sequence
atgctccgaacagctggtcgggatggcctttgccgccttagcacttacttggaggagctggaggcagtagagctgaagaaatttaaactctacctgggcacggcaaccgaactcggagagggaaaaattccgtgggggtccatggagaaagcaggcccactggagatggcccaactccttatcacacattttggcccagaggaagcatggaggctcgcactatctacctttgagcgaattaataggaaagatctttgggagaggggccaaagagaagacctagtgagggacacgccacccggaggaccgagctcgctggggaatcagtccacttgcctacttgaagtcagcctcgtgacaccccgaaaggatccccaggagacctacagggattacgttaggaggaagttccggctgatggaggatcgcaacgcacgtctcggcgagtgcgtgaatctgtcgcataggtatactaggcttctcctcgtcaaagaacactctaaccccatgcaagtgcagcaacagctcctggacacaggtagggggcatgctcggaccgtagggcatcaagcatcacctatcaaaatcgaaacgctgttcgagcccgacgaggaacgacctgagcctccaagaacggtggtgatgcagggagccgcaggcatcggcaaaagcatgctcgcccataaggtgatgctggattgggccgacggtaagttgtttcagggcaggttcgactacctgttttacattaattgccgtgagatgaatcagtccgctactgagtgtagcatgcaggacctgatcttttcttgctggcctgagccttctgcccctctgcaggagttgataagagtaccagaacgcctgttattcattattgacgggttcgacgaactaaagcccagtttccacgatccccaaggtccttggtgcctttgttgggaggagaaacggcctaccgagctgttgctaaacagcctcattcgtaagaagttgctacctgagctttcgctgctgataaccactcgtcccactgcactcgaaaagctgcaccgcctcctagagcaccctagacacgttgagatccttggcttctctgaggccgagcggaaagagtacttctacaagtatttccacaacgctgagcaggccggtcaagtcttcaattatgtgcgggataatgaacctctgttcaccatgtgcttcgtgccactcgtgtgctgggtcgtgtgtacatgtttacagcagcaattagaaggagggggtttactgaggcagaccagcagaacaaccaccgcagtttatatgctgtatctgctttctctgatgcaaccaaagcccggagcccctcggttacagccccctccgaaccagcggggtctgtgctctctcgctgccgatggactgtggaaccagaagattctgtttgaagaacaggatcttcgtaaacacggactcgatggagaggatgtgtcggcctttcttaacatgaacatcttccagaaggacatcaattgcgaaaggtattacagctttatccacctgtcctttcaagagttctttgctgccatgtattacatcctggatgaaggcgaagggggtgccggtccagatcaggatgtgacgcggctcctgacggaatacgccttttccgagaggagtttcctggctttgacctcgcggtttctctttggactcctgaacgaagagactcgctctcacctggagaagagtctgtgctggaaggtttctccacacataaagatggacctgctgcagtggatccagagcaaagctcagtccgacggctccacccttcagcaggggtcccttgaattctttagctgcctctatgagattcaggaagaggagtttatacagcaagccttgtcacatttccaggtcattgttgtgtctaacatcgcatcaaagatggagcacatggtgagcagcttttgcctgaaaagatgtcggtctgcccaggtcttgcacctatatggggcaacttactcagctgacggcgaagaccgcgcaaggtgttccgcaggcgctcacacactccttgttcagctccccgagcgaaccgtactcctggatgcatattccgaacacctggccgcagccttgtgcaccaaccctaatctaattgaactgtctctctatcgtaacgcactgggctcccgaggtgttaagctgctctgtcagggtcttaggcaccccaattgcaaactgcaaaaccttcggctcaagcgctgcaggatatccagttccgcgtgtgaggatctgagcgccgcattaatcgcaaataagaatcttactcggatggatctgagtgggaatggcgttgggttccctggcatgatgctgctgtgcgaggggctcaggcatccccagtgccgcctgcagatgattcagttacggaaatgccagctggaaagcggggcttgccaggagatggcatccgtgctggggaccaatccacatttagtcgagctcgaccttacaggtaacgcattagaagatctgggtttgcgcttgctctgccagggactgcggcatcccgtctgtcgcctgaggaccctctggctcaaaatatgtcgactgactgccgcagcatgtgacgagctcgctagtaccctaagtgttaatcagtcattgagagaattggacttatctctgaacgagctgggcgacctgggtgtgctgctattgtgcgaaggactgcggcatccaacgtgcaagcttcagacactccgcctggggatctgcaggctaggatccgcagcttgcgagggcctgtccgtggtactacaggccaatcacaatctccgggaactggacctcagttttaatgacctcggcgactggggcctatggttgctggctgagggattacagcacccggcttgccggcttcaaaagctgtggttgttcggaatggatttgaataagatgactcactcaaggctggccgcactcagagtgaccaaaccgtacctggatattggttgttag

SEQ ID NO: 31256 - DNA, 2517 bp, synthetic construct
  source 1..2517: mol_type = other DNA; note = Synthetic coding sequence
atgactggggcagagattgaaccttccgctcaggcaaaacctgagaagaaagccggagaggaagttatagctgggccagaaagggagaatgacgtccccctggtcgttcggcctaaagtgagaactcaggctacaacaggcgctcgccctaagactgagacaaaatcagtgccagccgcaagacccaagaccgaggcccaggccatgagcggagcgagacccaaaactgaggttcaggtgatggggggagctcggccaaagacggaggctcagggtattaccggggcaaggcccaagaccgacgcccgtgccgtgggtggagccagaagtaagactgacgctaaagctattcctggcgctaggccaaaagacgaagcacaggcctgggcccagtctgagtttggaaccgaggctgtttctcaggcggaaggggtctcacagaccaacgccgtagcgtggccactggctacagccgaatctggctccgtaaccaagagcaagggcctgagcatggatcgagaattagtcaacgtggacgccgagacgtttcccggtactcagggacaaaaaggcattcaaccttggttcgggcctggggaagagacgaacatgggaagttggtgctactctcggcctcgcgcacgggaggaggcaagtaacgagtccggattttggagtgccgatgagacaagcacagctagcagcttttggacgggggaagagacttcggtgaggtcttggcctcgagaagaatctaatactcgtagccggcaccgggcaaaacaccaaactaatcccagatcccgccctcggtcaaaacaggaagcatatgtggactcgtggtctgggagtgaggatgaggcgagcaatccattcagcttttgggtcggggagaacacaaataatctttttcggcctcgcgttagggaggaagctaatatcaggtctaagctgcggacgaatcgggaggattgcttcgaatcagaatccgaggacgaattctataagcagtcctgggttctaccaggagaagaggcaaatagtcgtttccgccatagggacaaagaggacccaaataccgccctaaaactgcgcgcacaaaaagacgttgactccgaccgggtcaagcaagagcccagattcgaagaagaggtcatcatcggttcctggttctgggccgagaaagaagcatccctcgaggggggtgcttctgctatctgtgagagcgagcctggcaccgaggaaggggctattgggggatccgcctattgggcagaggaaaagtcaagcttgggagccgtagccagagaggaggcgaagcccgaaagcgaggaggaggccatctttgggtcctggttctgggacagagatgaagcctgtttcgaccttaatccgtgtcccgtgtacaaagtctctgatcgcttccgcgatgcagcggaggaattgaacgcatcctctcgccctcagacttgggatgaagtgaccgtggaatttaagccagggctattccatggtgttggattcagaagcacctccccttttgggatccccgaggaggcctcagagatgcttgaggcaaaacctaaaaatttagaactatcacccgagggtgaggagcaggaatcgttattgcagcctgaccagccttcaccagagttcacatttcagtatgacccaagttatcggtctgtccgagagattcgagaacacctgcgtgccagggagtccgcagagagtgaatcgtggagctgctcttgcattcagtgcgagctgaaaattgggagcgaggagttcgaggagtttctgctcttgatggacaaaatccgggacccttttatacacgaaatctccaaaatagccatgggcatgcgcagcgcatcacagttcacgcgcgactttattcgggattccggtgtcgttagcctgattgagacgctgctgaattacccgagctccagggtaagaacgtctttcctagaaaacatgatccatatggcccctccttatccgaatctgaatatgatcgagaccttcatttgccaggtctgcgaggaaactctggcccactctgtagatagccttgagcagttaaccgggatccgcatgcttaggcatctcacaatgacgatcgattaccacactttaattgccaactacatgtctggcttcctcagtctgcttactactgccaatgcccgaactaaatttcacgttctgaagatgttgctcaacctcagcgaaaaccccgcagtggcaaaaaagcttttctcagctaaggccctctcaatcttcgtcggactatttaatatcgaagaaactaacgacaacatccaaatcgtgattaaaatgttccagaacataagcaatatcattaagagtggcaagatgagtctcattgatgacgacttcagtctggagcccctgatttctgctttccgtgagtttgaggaactggcaaaacaactccaagctcagattgacaaccagaacgacccagaggttgggcaacagtcatag

SEQ ID NO: 31257 - DNA, 165 bp, synthetic construct
  source 1..165: mol_type = other DNA; note = Synthetic coding sequence
atgggcaactcagacagtcaatacactctgcagggatctaagaaccactcaaatacaatcactggggctaaacagattccgtgtagcttaaagatccgcggaatacacgcaaaggaggagaaatcactacacggctggggccatggcagtaatggtgccggttag

SEQ ID NO: 31258 - DNA, 1269 bp, synthetic construct
  source 1..1269: mol_type = other DNA; note = Synthetic coding sequence
atggccagtctgtcccgtgcgcttagggtcgctgccgcacatcccaggcagagtccaactagaggaatggggccttgcaatttgagctccgcggctgggcctaccgccgaaaaaagcgtgccgtaccagagaactctcaaggaggggcagggaacaagcgttgtggctcagggaccgtcacgaccactaccctcaacagccaacgtggttgttattggaggcggatcacttggttgccagacgctatatcatttagctaaactggggatgtctggggcagtacttctcgaaagggagcgcctgaccagcggaaccacttggcacactgctggtttgctgtggcagctcaggccctcagatgtcgaggttgagctgcttgcccacacgaggcgcgtggtcagtagggaactagaagaggaaacaggtctccataccggttggattcagaatggcggacttttcatcgcctctaatagacagcgtcttgatgaatacaagagactgatgagtctcggcaaggcctatggtgtggaatctcatgttctgtcaccagctgagactaaaaccctctatccgttgatgaacgtcgacgatctctatgggaccctttatgtgccacatgacggcactatggatccagccggtacatgtacaactttggcacgggcagccagcgccaggggcgctcaggttattgaaaattgccctgtgactggtattcgagtgtggactgatgacttcggcgttagacgggtcgcaggggttgaaacacagcatggaagcatccaaaccccctgcgtggttaactgcgctggtgtttgggcgagcgccgtcgggagaatggctggcgttaaggtgccactggtcgctatgcatcatgcgtatgtcgtgaccgagaggatcgaagggatacaaaacatgccaaacgttcgtgaccacgacgccagcgtttatcttagactccagggagacgccctctccgtgggcggttatgaagccaaccctatcttttgggaagaagtgtcagataagtttgcctttggtttgtttgatttggactgggaggttttcactcagcatatcgagggtgctatcaaccgcgttcccgtcctggaaaagaccggcatcaaatcaacagtgtgtggcccagaatccttcacacctgatcacaaacccctaatgggtgaagcacccgagctgagaggcttcttcctcggctgtgggtttaactccgccggagaatcagggcaagcactactggcaccttag

SEQ ID NO: 31259 - DNA, 327 bp, synthetic construct
  source 1..327: mol_type = other DNA; note = Synthetic coding sequence
atgagtatgcttaagccaagtggactgaaggctccaacaaagatacttaagccgggttcaacggccttgaagacaccaacagctgtggtggccccagtggagaaaacaatctccagcgaaaaagcttctagtacacccagttccgaaactcaggaggaattcgtggacgacttccgagtcggtgagcgtgtctgggtcaacggtaacaaaccgggtttcatacagttcctgggggagacacagtttgccccaggccaatgggctggcattgttttggacgagccaattggaaagaatgatggatctgttgctggcgtcagatactag

SEQ ID NO: 31260 - DNA, 2148 bp, synthetic construct
  source 1..2148: mol_type = other DNA; note = Synthetic coding sequence
atgaagcgtggtaggcttccttcaagctctgaggacagcgatgacaatgggtccctgtccactacttggagccagaattctcgttcacagcatcgaagatctagttgttcaagacacgaagatcgaaaaccgtctgaggtcttccgtaccgatctgattactgccatgaagcttcacgacagttaccaactgaatccagatgagtactacgtgttagctgatccctggaggcaggagtgggaaaaaggagttcaggtccctgtgtcgccgggaaccattcctcagcctgtggctcgggtggtgagcgaagagaaatctctgatgtttattcggcctaaaaaatacatcgtgtcttctgggtctgagccacctgaacttgggtatgtcgatattaggaccctcgcagattccgtgtgtagatacgacttgaacgatatggacgccgcttggttggagctgacaaatgaggagtttaaagaaatgggaatgcctgagctggatgaatatacaatggaacgtgtgttggaggagtttgagcagagatgctatgataacatgaatcacgccatcgagaccgaagagggactgggcatcgaatacgacgaggatgttgtgtgtgacgtgtgccagagccctgacggcgaggacggaaatgaaatggtgttctgcgataaatgtaatatctgcgtacatcaggcctgttacggtatccttaaggttcctgagggttcttggctctgtcgcacttgtgccctgggggtccagccgaagtgcctcctctgtcctaaaaagggaggggcaatgaaacccactcgctcaggaacaaaatgggtccatgtctcttgcgccctgtggatcccggaggtttcgattggatcccccgaaaagatggagccaataactaaggtgagccatattccgagcagccgctgggcactcgtttgctctttatgtaacgagaaatttggggcttccatccagtgttcagtcaagaactgcaggaccgccttccacgtgacctgtgcctttgatagagggctggagatgaaaaccattctggcggagaacgacgaagtgaaatttaagtcctattgtccaaagcatagtagccatcggaaaccggaagagagcctcggtaaaggggcagcacaggagaatggagctcccgagtgttctccacgtaatcctcttgagccgttcgccagcctggagcagaacagagaggaggctcatagggtcagcgtgagaaagcaaaagttgcagcagctagaggacgagttttacaccttcgtgaatttattggatgtcgctcgggcactgcgtctccctgaggaggtggttgattttctctaccagtattggaaactcaaaaggaaagtgaattttaacaagcccctcatcactcccaaaaaagatgaggaggacaacttggccaagcgtgagcaggatgtactttttcggcgactccagctgttcacccacctgaggcaagatttggagcgcgtacgtaatttgacttacatggtgactcggagagagaagattaaacgatccgtctgtaaggttcaggaacagatattcaatctgtataccaagctgttggaacaggaacgtgtgtcaggcgtgccaagtagttgctcatcttccagtcttgaaaacatgctgctctttaattccccttcagtggggccagatgcccctaagatagaggatcttaagtggcattccgccttttttcgaaaacagatggggacaagcctggtgcattccctcaagaaaccacacaagcgcgaccctctacaaaattcacctggctcggaaggcaagacgctattaaagcagccagacctgtgtggaaggagagaaggcatggtagttcccgaaagctttctaggcctggagaagacctttgccgaggctagacttataagtgctcagcagaagaatggcgtggtaatgcccgaccacggcaagcggagggataatcgattccactgcgatctgatcaaaggggatctcaaagataagagtttcaagcaatcacacaaacccctgagaagcactgacgtctctcagagacatctagacaatacgcgggctgccgctatatggcggttccgtgtgatctggcaaggcccagcagcgtag

SEQ ID NO: 31261 - DNA, 162 bp, synthetic construct
  source 1..162: mol_type = other DNA; note = Synthetic coding sequence
atgggacgcaggtctacctcttcaactaaaagcggtaaattcatgaacccgacagatcaggctcggaaggaggccaggaagcgggaactgaaaaaaaacaaaaaacaaagaatgatggtgagggctgccgtgctcaaaatgaaggatcctaagcagatctag

SEQ ID NO: 31262 - DNA, 1035 bp, synthetic construct
  source 1..1035: mol_type = other DNA; note = Synthetic coding sequence
atgacaacacggtctgtcttggacgtcgaaacgtttgtggccgatattctgaaaggagagaacttgtcaaaaaaggccaaggagaaacgggagagcctcattaaaaaaatcaaagatgttaaaagcatctacttacaggagtttcaggataaaggcgacgcagaggacggcgaagagtacgacgaccctttcgcaggccctccggacactatctctttggccagtgagcgttatgataaagacgatgaggctccgagcgacggagcccagttcccccctatcgcagcccaagacttaccctttgtcctcaaggctggttatctggaaaagcgccgaaaggaccattcctttctgggtttcgaatggcagaagagatggtgtgctctgtcaaagacagtcttctactactatggatctgacaaggacaaacagcagaagggtgaatttgcaattgatggttactccgtcagaatgaacaataccttgcggaaggatgggaaaaaggactgctgcttcgagattagcgcaccagataagaggatttaccaatttaccgccgcttcccccaaggacgcagaggaatgggtgcagcagctgaaatttgttctccaggacatggagtctgatattattcctgaagattacgatgagcgcggagaactgtacgacgacgtagatcaccccctacccattagtaatccgctgacctcaagccaacccattgatgacgaaatatatgaggaactccccgaggaggaagaggatagtgcccctgtcaaagtggaagaacaacgcaagatgtcacaggacagtgtccatcacaccagtggcgacaagtccactgattacgccaacttctaccagggcctgtgggactgtaccggggcattcagcgacgagttatcctttaaaaggggcgacgtgatatacatcctgtctaaagagtataaccggtatggctggtgggtgggggaaatgaagggcgcaattgggcttgtaccaaaggcctacatcatggaaatgtatgatatctag

SEQ ID NO: 31263 - DNA, 2868 bp, synthetic construct
  source 1..2868: mol_type = other DNA; note = Synthetic coding sequence
atggaggtcggatctgaagaagagaaatgggaaaaactcgacgccgaatttgatcacttcgtagtcgacatgaaaccctttgtcttgaaactcccccataggacagagaggcaacgctgcgccttgtggattagaaagctgtgtgagccatccggtaccggtgcagggattatggggaggaagaataggaacctctatgccaaactgttgctacacatgttaaaacggggagctctggaaggcccttttactcacaggccagagcccggaacgttgaagatacttccgtcctatatgtctatctactttgacgaacctaatcccgctcgcgctaaggggtcttctcctgaggggctccccgcatgggtcctcggggagcttgagactagcgagcataaactgaacgagtcctggaagttatcaagcggcgaggacaacacgctcgtacaatcacccaccgacgtgtatagtcgtgaacagtacaccggcaaactgagagttcgttctcactccctctcacccacacacagagaagacggccagaatataacaccgaaaatttgtgaggtgtactccaaaaagtctcccgtgagcctcgatgacagcgacatcgaggcgcgactgaacagctggaacttgggtatcgagaatcctagatatctccgccagaagcccatacctgtgtccctcatgacacccaagtttagtttgaggaaaagtagctcatttcacgatgaccattttctctccagaattcgagagaaagaactggacatgaaaactaaaatgatggaggctaaattccatgaggaaaagctgaagctccaacagaaacacgacgccgacgttcagaagattctggaaagaaagaataatgagattgaagagctcaaaaccctgtaccgatcaaaacagcacgaaacagaagagactatccgaaagcttgagaagaaagtgcagacactaatacgggactgtcaggtgattcgagaaacaaaagaggaccagatcgctgaactgaagaagatttgcgagcagagcactgaatcactgaataatgactgggagaagaaactgcacaatgccgtggccgaaatggagcaagaaaaattcgatctccagaaacaacacacagagaacatccaagagctgttggaggacacaaatgtgcggcttaataagatggagtcggagtacatggctcagacccaaagtactaaccacatgatcaaagagctggaagctagagttcagcaactcacaggcgaggcggagaactcaaatctccagcgacaaaaactgattcaggaaaaggctgagctggaacgttgctaccagatcacctgctctgagttacaagaagtgaaagcacgaaggaacaccctccacaaagaaaaagatcatctggtaaacgattacgaacagaacatgaagttgcttcagacgaaatacgatgccgacatcaacctgcttaaacaggaacacgcactgagcgcaagcaaggcatcttccatgattgaggagctcgaacagaatgtgtgccagttaaaacagcagttgcaagagtcagagctccagcggaaacagcaactgagggatcaggaaaataagttccagatggagaagagccatctgaagcatatctatgaaaaaaaggctcacgacctgcagagcgaactggacaagggaaaggaggacactcagaaaaaaatacacaaattcgaagaagccctcaaagagaaagaagaacagctcactcgtgtcaccgaagtgcagcgattacaggcccaacaggcagatgctgcactggaggagttcaagcgtcaggttgaacttaatagtgagaaggtgtatgcagagatgaaagagcagatggaaaaagtcgaggcggatcttacccggtccaaaagtcttagggagaagcaatcaaaggagtttctgtggcaactggaggatattagacaacgctacgaacagcaaatcgtggaattaaaactggagcacgaacaggagaaaacccacctcctgcaacagcataacgcggagaaggactcgctcgtgcgtgatcatgaacgcgagatcgaaaacctggagaagcagttgcgggctgcaaacatggagcatgagaatcaaattcaggagttcaaaaagcgcgatgcacaggttattgctgatatggaagcccaggtgcataagctgcgggaggaactgatcaatgtgaattctcagcgcaaacagcagcttgtcgagttaggtctgctccgagaagaagaaaaacagcgggctacgcgcgaacatgagatcgtggtgaacaagctaaaagctgaatctgagaaaatgaagattgagctgaagaaaactcatgccgctgagaccgaaatgactctggaaaaggcgaactccaagctgaaacagatcgaaaaagagtatactcagaagctcgctaagagtagtcagataatcgccgagctgcagactaccattagctccctcaaggaggaaaattcccaacaacaactggccgcagaacgaagacttcaggatgtccgccaaaagtttgaagacgagaaaaaacagctgattagggataatgatcaggccataaaggtcctgcaggacgaactagagaacagatccaatcaggtaagatgcgcagaaaagaagctccagcataaagaactagaatctcaagaacagataacatatattaggcaggagtacgagacaaaactcaaggggcttatgccagcatcactgcggcaggagctggaagacacaatctcttcgctcaagtcacaggtgaattttctgcagaagagggcatcaatactccaggaagagctcaccacatatcaggggagaagatag

SEQ ID NO: 31264 - DNA, 834 bp, synthetic construct
  source 1..834: mol_type = other DNA; note = Synthetic coding sequence
atgttatcccaaaaggaggtagctgttgctgatgccaaaaaatccctcgagcttaatccgaacaattcaaccgcaatgctgaggaaaggcatctgcgagtaccatgaaaaaaactatgccgcagcgctagagacatttacagagggacaaaagctggattccgctgacgcaaacttctcggtatggatcaaacggtgccaggaggcccaaaacggatccgaatccgaggtctggacccaccagagtaaaatcaagtacgactggtatcagactgagtcacaagtggttatcacgctcatgataaagaacgttcagaagaacgatgtcaacgtagaattttctgagaaggagctctctgccttagtcaaattaccatctggagaggactacaacttgaagctggaacttctgcatccgataattccagagcagtccacttttaaagtgctttcaactaagattgaaattaaacttaagaaacctgaggctgtacgttgggagaagctagagggtcagggcgacgtcccgactcctaagcagttcgtggctgacgtgaagaacctgtatccatcctctagtccttacacgcgcaactgggataagctggtcggtgagatcaaggaggaggagaagaatgagaagctggaaggggatgccgctttaaaccggctgttccagcaaatctacagtgatggatctgacgaggtgaaacgggcaatgaacaaaagcttcatggaatctggcggtacagttctgagcaccaactggtcagacgttgggaagagaaaggtggagatcaatccacccgatgatatggaatggaagaagtactag

SEQ ID NO: 31265 - DNA, 807 bp, synthetic construct
  source 1..807: mol_type = other DNA; note = Synthetic coding sequence
atggggagtgccaagagtgtgcctgtgaccccagcgagaccacctccacataataaacacctggcccgtgtggctgatcccagatcgccctcggcaggaatcctccgaacacccatccaggtggagagctctccccagcccggattacccgctggtgaacaattggaggggctgaaacacgcgcaggattcggatcctcgcagtccaacccttgggatcgccaggactcccatgaagaccagctctggtgatcctcctagtcctctcgtaaaacagttgtctgaggttttcgagaccgaagatagtaaatcaaacctgccacctgaacctgtactcccacctgaagcccctctgagctccgagctcgatctacctctgggcactcagctttctgtggaggagcagatgcctccttggaatcagacagagttcccctccaaacaggtctttagcaaggaagaagctcgtcaaccaacggagacaccagtggcctctcaatcttctgacaagccctcccgtgaccccgaaacacccagaagtagcgggtctatgaggaaccgctggaaaccgaactcaagcaaagtcctgggcagatctcctctgaccattctacaggacgacaattccccagggacattgaccctccgccagggcaaaaggccttcccccttaagcgaaaacgtgtccgagttaaaagagggagcgatcttgggaactggtcgactccttaaaacaggcggaagggcctgggaacagggccaagaccacgacaaggaaaatcagcacttcccactggtcgagtcctag

SEQ ID NO: 31266 - DNA, 1140 bp, synthetic construct
  source 1..1140: mol_type = other DNA; note = Synthetic coding sequence
atggtttttaagctgaagacaaaagaggagcagcactcgatgctgggatcaggctttaaggcagagaggctccgcgttaacttgcgactggtgatcaatcggcttaagctgttggaaaaaaaaaagacagagctggctcaaaaagccagaaaagaaatcgccgattacctcgccgctgggaaagatgagagagctaggattcgggtcgagcatatcatacgcgaggactatcttgtggaggcaatggaaattttagaactgtactgtgacctgctcctagctcggttcggactcatccaaagtatgaaggaactcgacagtggactggcagagtctgtaagtacactgatctgggcagccccacgcctgcaaagtgaggtggcagagctgaagatcgtggcagaccagctgtgcgctaaatacagtaaggaatatgggaaactgtgtcgcacaaaccaaatcgggactgttaacgatcgactcatgcataaactgagtgtcgaggccccacccaaaatattagtggaaaggtatctcatagaaatcgccaaaaattacaatgtgccttacgaaccagattccgtggttatggccgaggccccacccggagtcgaaacagacctcattgacgtgggatttaccgacgatgtcaaaaaggggggtcctggcaggggtggttcagggggattcactgccccagtggggggaccagacggcactgtgcccatgcccatgcccatgccgatgccgatgccaagtgctaatacaccgttcagttatcctctgcccaagggtccatcggacttcaatgggctgccaatgggcacctaccaggcctttcctaacattcacccaccccagattccggctactcccccatcctatgagtctgtcgacgacattaatgcagataaaaacatatcttcagctcagatcgtgggtccaggtcctaagcctgaggcctcggccaaattaccctcaaggccagccgacaactatgacaacttcgtactgccagagctgcctagcgtgcctgatactcttccaaccgcttcggcaggggcaagtaccagcgcatccgaagacatagatttcgatgatctgtctcgcagattcgaggaactgaaaaagaagacctag

SEQ ID NO: 31267 - DNA, 903 bp, synthetic construct
  source 1..903: mol_type = other DNA; note = Synthetic coding sequence
atggctcgccctctgtctactccctcctccagccagatgcaggctcgcaagaaacaccggggaattattgagaagagacgaagagatcggatcaatagctccctcagcgaattaagacgccttgttcctaccgcctttgagaagcaaggatcatcaaagctggagaaggcagaagttctccagatgactgtagaccatctgaagatgttgcatgccaccggcggaactggtttcttcgatgcccgagcgttggcggtcgatttccgcagcatcggttttcgcgaatgccttactgaggtcatcaggtatctgggggtcctggaaggccctagctcccgtgcggatccagtgcgcatcaggctgcttagtcaccttaactcgtacgcagctgagatggaaccctctcctacccctacgggcccactggccttccctgcctggccctggagtttcttccactcctgtccagggctgcccgcactcagtaatcagctcgctattctcggtagggtcccaagtcccgtgttgcctggcgtttcgtctccagcctatccgatcccagccctccgaaccgctccactgagaagagctacgggcatcatccttcctgcccgtcgcaacgtgctgcctagccggggtgccagctcgactcgcagagccagaccactggagagacccgctaccccggtgccggtcgctccgagtagccgggctgccaggagttcccatatcgcccctctgcttcagagctctagcccaacaccgcctggacccactggttccgctgcctatgtggccgttccaacacccaactcttcctctcctggcccagctgggcgtcccgctggagccatgctgtaccacagttgggtttctgagatcaccgagataggagcattctag

SEQ ID NO: 31268 - DNA, 318 bp, synthetic construct
  source 1..318: mol_type = other DNA; note = Synthetic coding sequence
atgtccgttgtccccccaaatcggtcacaaaccggatggccccgtggcgtgacacagttcggcaacaaatacatccagcagacaaaaccgctgactctcgagcgcacaataaacttatatcccctgaccaactatacgttcggaacaaaagagcccctgtatgagaaagactcctccgtggcagccagatttcagcgcatgcgcgaagagttcgacaagattgggatgcggcgtacagtcgaaggcgtgctgatcgtccatgagcatcgcctaccccatgtgctgctcctaagtcgttttaatttcatctacaactag

SEQ ID NO: 31269 - DNA, 588 bp, synthetic construct
  source 1..588: mol_type = other DNA; note = Synthetic coding sequence
atgggcaacagcgactcgcagtacaccctgcaaggtagcaagaatcacagcaatactataacgggagccaaacagattccctgttctctcaaaatcagagggattcacgccaaggaagaaaaatccctgcatggatgggggcacggttcaaacggcgctgggtacaagtccagaagcctagcccgtagttgcctctctcactttaagtcaaatcagccctacgcaagtcgattgggcggtcctacatgtaaggtctcacgaggggtggcctattcaacccataggactaatgcccctggaaaagactttcagggaatttctgccgcattctccacagaaaacgggttccacagcgtgggacatgaactggccgacaaccatataaccagccgcgattgcaacggccacctcctgaactgctatggccgtaacgagagcattgcatccacccccccaggggaggatcgcaaaagccctcgcgttctgattaaaacactggggaagttagacggatgtctgcgcgttgagttccacaatggagggaatccaagcaaggtgccggctgaagattgctctgagccagtgtag

SEQ ID NO: 31270 - DNA, 1581 bp, synthetic construct
  source 1..1581: mol_type = other DNA; note = Synthetic coding sequence
atggtgcccggagaggagaaccagctggtaccaaaagaggatgtgttctggcgctgtaggcagaacatcttcgacgaaatgaagaagaagttcctgcagatcgagaatgccgctgaagagcccagggtgttgtgtatcatccaggacaccacgaattcaaaaacagtcaatgaaaggatcaccctcaatttaccagccagtacgcccgtgagaaaactctttgaggatgtggcgaacaaggttggatacatcaatggcactttcgacttggtgtggggcaatggcatcaacacagccgacatggcacctctggaccacactagcgataagtccttacttgatgctaactttgagccagggaagaagaacttcctccaccttacagataaggatggcgaacagccccagatcttactcgaggattcttccgccggtgaggatagcgtccacgacaggttcattgggccactgcccagggaaggtagcggcggttcaacatctgactatgtgtcccagagctatagttacagtagtattctaaataagtctgagactggctacgtgggattggtcaaccaggctatgacttgttacctgaacagccttctgcagacgttgttcatgacgccggaattcagaaatgccctgtacaagtgggagtttgaggaatctgaggaagatccagtgacatcaatcccctatcaactgcagagacttttcgtgctccttcagacatccaagaaaagagccatagagaccactgatgtgacccggagctttggatgggatagctcagaggcctggcagcagcacgatgtccaggaactctgcagggtcatgtttgatgccctcgagcagaagtggaaacagacggaacaagccgaccttatcaatgagctctaccagggaaaattaaaagactacgtcaggtgtctggagtgcggctatgaggggtggagaatagacacctacctggatatacccttggtgatacgcccatacggctcctctcaagccttcgcaagcgtcgaagaagcactacatgctttcattcagcccgagatactcgacgggccaaatcagtacttctgcgagcggtgtaagaagaagtgcgacgccaggaaaggcctaaggttcctacattttccctatctgcttacgctccagctgaaacgttttgacttcgattacaccacaatgcataggatcaaactgaatgacaggatgaccttccctgaagaactggatatgtccaccttcatcgacgtcgaagatgaaaagtcaccacaaaccgaatcttgtaccgacagtggggctgaaaatgagggcagctgccattccgatcagatgtccaacgatttctctaatgatgacggcgtggatgagggtatctgtctggagacaaactctggcacagagaaaattagcaaaagtggattggaaaaaaattcattaatctacgaactgttttcggttatggtgcacagcggaagcgccgctggagggcattattatgcttgtatcaagtcctcggtgatgagctcgggtaccgcctctatgatcaacatgtcagcaggatag

SEQ ID NO: 31271 - DNA, 963 bp, synthetic construct
  source 1..963: mol_type = other DNA; note = Synthetic coding sequence
atgggcaaggaacaggagctgttggaagcagccagaactggtcacctcccagcagttgagaagctcttatcgggcaagcgactttcgtctggctttggcggtggcggaggcggaggatctggtggcggtggcggaggttcaggaggaggtggtggagggctgggctctagttcccaccccctcagttccttgctgagtatgtggaggggaccgaatgtgaactgtgttgacagtactggctataccccactgcaccacgctgcactgaatggccacaaagacgtagttgaggtgctgctccggaacgacgccctaaccaatgtggctgactcaaaaggctgttaccccctccaccttgccgcatggaagggagacgcccagatcgtgcggctcttgatccaccagggtccctcccatacaagagtcaacgaacaaaacaatgacaacgagaccgccttgcactgcgctgcccaatacggacacacagaggtggtgaaagtgcttcttgaagagctgacggacccaacgatgcgcaataacaagttcgagacccctctggatctggctgctctgtatggcaggctggaggtggtcaaaatgcttctgaacgctcatccaaaccttctgtcttgcaacactaagaagcacacaccactgcacctggcagcacgtaacggacataaggcggtagtccaggtcctcctggacgctggcatggatagcaactatcaaacagagatgggaagcgctcttcatgaagcggcactctttggcaaaaccgacgtggtgcagatactgctggccgcagggactgatgtgaacatcaaggacaatcacggactcacagcactcgatactgtgcgcgagctgcccagtcaaaaaagccagcagatagccgctctgattgaggatcttgacacactgcagttctacttcattagctgcccctttcagggcctgtag

SEQ ID NO: 31272 - DNA, 660 bp, synthetic construct
  source 1..660: mol_type = other DNA; note = Synthetic coding sequence
atggtgattcataaaaatccacctgatacccctacggagtcccagttcactagatttctgtgcagttcaccgctcgaggctgaaaccccccctaatggcccagattgtggttatggctcatttcaccagcagtattggttagatgggaagatcatcgccgtgggtgtcattgatatcctgcccaactgtgtttcatccgtatacctgtactacgacccagattattcttttctttccctgggggtgtattcagctctgagggaaatcgcttttacgcgccaattacacgagaaaacatcacagctctcctactactacatgggcttctacattcacagctgccctaaaatgaaatataagggacaataccgtccatccgacctactgtgtcccgagacctatgtgtgggtccccattgagcaatgtttgccttctctggagaattctaagtactgcagatttaaccaggacccagaagctgtggatgaagataggtccacagagccagatcgactgcaggtctttcacaagcgcgcaattatgccttacggagtgtacaagaagcagcaaaaggacccctctgaggaggctgccgtccttcagtatgcatccctagtcggtcagaaatgcagtgagaggatgcttttgtttcggaattag

SEQ ID NO: 31273 - DNA, 1791 bp, synthetic construct
  source 1..1791: mol_type = other DNA; note = Synthetic coding sequence
atgcagcagaaagaactcggtacatttgctcaaagctcaattgctctccaccaccagtacaatccgaagttccagacacttttccaaccgtgcaacttaatgggagcaatgcaactgattgaggacttcagtactcatgtgtcaatagattgctctccacataaaacagtgaagaagacggctaatgagtttccatgtctccccaagcaggtggcctggattttggctacgagtaaggttttcatgtatccagaactgctccctgtatgtagtctgaaggcaaaaaacccacaagataaaatactttttacaaaagcagaggataataaatacttgctgacttgtaagaccgcacgacagttgactgtgagaattaagaatctaaatatgaatcgagcaccagacaacattatcaaattctacaagaaaacaaaacagttgcccgttctgggaaagtgttgcgaagagattcaaccacaccagtggaagccaccaatcgagcgtgaagaacaccgtctgcctttttggctaaaggcatctctcccatcaatccaggaggagctacggcatatggccgatggggctcgagaagtggggaacatgacaggaacgacagagattaatagcgaccaggggctggagaaagataatagtgagctcggctcagagacccggtaccctttactcctccccaagggagtggttctgaagctgaaaccggtagcagatcggttccccaaaaaagcctggcgacagaagagatcctcagttctgaagccactcttgatacaaccctcacccagtttacagccttccttcaacccgggaaaaacaccagcgcaatcaacccactcagaggcccctcccagcaagatggtgttgcgtatacctcaccccatccagccggcaaccgttcttcaaacggttcccggtgtgccacccctcggggtgagcggaggcgaaagttttgagtcacctgctgcgctgccagcaatgccacccgaggctagaacttcctttccgctgagcgagtcgcagactttgctgagtagcgcacccgtgccgaaagtcatgatgccttccccagcctctagcatgtttcgcaagccttacgtgaggcgcaggccttctaagcgccgaggagcacgagctttccggtgtattaagcccgctcccgtgattcatcccgcatctgtaattttcacggtgccagccaccacggtaaagatcgttagcctgggcggtggatgcaatatgattcagccagttaacgcggcagtggcccagtcgccacagaccatcccaatcgcaacccttctggtcaaccccacatcctttccctgccccctgaatcagcccctcgttgcgagttctgtaagccctctgattgtctcgggaaattcagtgaatttacccatcccttcaacgcctgaggacaaggcccacatgaatgtcgatatcgcctgtgctgtggccgatggcgaaaatgccttccagggcctggagcccaaattggagccacaggagctgagtcccctgtctgccaccgtgtttcccaaagtcgaacatagtcctggtcccccacccgtggacaaacagtgccaggaaggcctgtcagaaaactccgcctaccgatggacagtggttaagactgaggaaggacggcaagcactagagcccctccctcagggaatccaggagtccttaaataactcaagtccaggagacctggaggaggtggtcaagatggagccagaagacgccaccgaggagatctccggctttctttag

SEQ ID NO: 31274 - DNA, 912 bp, synthetic construct
  source 1..912: mol_type = other DNA; note = Synthetic coding sequence
atggctgataagtcaaaattcatcgagtacattgacgaagctctggagaaaagcaaggaaacagctctgtcgcacttattctttacataccaaggcatcccttaccccatcacgatgtgcacctccgagacctttcaggctctggacacatttgaggcgaggcacgacgacattgtgctggctagttacccaaagtgcggctctaactggatcctgcacattgtatcagagctcatctatgctgtgtcaaagaaaaaatataaatacccggaatttcccgtcttagaatgtggcgatagcgaaaaatatcagagaatgaagggatttccatcacccaggattctggctacccaccttcactatgacaaactgccagggtcgatatttgagaacaaggccaaaatactggtgatcttccggaatcctaaagacaccgccgtgtccttcttgcactttcataatgacgtgcctgacatcccgtcctacggatcttgggatgaatttttcagacaatttatgaaaggtcaggtgtcctggggtcggtattttgactttgctatcaactggaacaagcatctagacggggacaatgtgaagtttattttgtacgaggacctgaaggagaacctggcggctgggataaaacagatcgccgaattcctcggcttctttttgacaggtgagcagatccagacaatctctgtacaaagcacttttcaggcaatgcgagccaagtcccaagacacgcatggagcagtcggtcctttcctgttcagaaaaggggaagtgggggattggaagaacctcttctcagaaatccaaaaccaggaaatggatgagaaatttaaggaatgcctggcagggacttccctaggtgcgaaactgaaatacgaatcttactgccagggctag

SEQ ID NO: 31275 - DNA, 366 bp, synthetic construct
  source 1..366: mol_type = other DNA; note = Synthetic coding sequence
atgggagtccctgagatcccaggggaaaagctggtgaccgaacgaaacaagaagcgcttagagaaagagaagcacgagaaaggcgctcagaaaactgactgtcagaagaacctgggcacggtgggggcagtggcactggattgcaaaggaaacgttgcttatgctacgagtactggcggaatagttaacaaaatggttggcagggttggcgattccccttgcctgggacggaccaaaggctgtctgctgccgctgcccttgttttcaagacctcaggcattcctcacattgtattcgctgccattgtccgtcagttgttgcgttccttttctgcttctcgtgcaactacaggacgtgtgggaatag

SEQ ID NO: 31276 - DNA, 579 bp, synthetic construct
  source 1..579: mol_type = other DNA; note = Synthetic coding sequence
atgactcttgggtctaaaagccagcagcctccagaggatatcaaggctctgtcatggaacagacaagcccagcacattctttctagcgcccacccttctggcaaagctgtagtgtgggacctacgtaagaacgagcccattattaaagtgtccgaccattccaatcgcatgcactgctcagggctcgcctggcaccctgacattgcgacccagctagtgttgtgttccgaggacgatcgcctcccagtaatccagctgtgggacctcaggtttgcctccagtcccctgaaggtgctcgagtcccactcgcggggaatactgtccgtctcttggtcgcaggctgatgctgagctcctgctaacatctgcgaaagacagtcagatcctctgtcgaaacttaggttcctccgaggtagtgtataaactacccacgcaaagcagctggtgcttcgatgtacagtggtgtccccgagacccgtctgtgttcagtgctgcaagttttaacggttggatttcattgtatagcgtgatgggtaggagttgggaggtgcaacatatgcgacaagcggacaaggtatag

SEQ ID NO: 31277 - DNA, 621 bp, synthetic construct
  source 1..621: mol_type = other DNA; note = Synthetic coding sequence
atgaaggacgtagacaacctaaaatcaatcaaagaagaatgggtctgcgaaactggaagcgataatcagccgctgggcaataatcagcagagcaattgtgagtattttgtcgactccttatttgaagaagcccagaaagtctcttctaagtgtgtctctcccgctgagcagaaaaagcaagtagacgtgaacattaaactgtggaagaatggctttaccgtgaatgatgattttaggtcgtactcagatggagcgtctcaacagttcttgaacagcattaaaaaaggcgagcttccttctgaactccagggaatattcgacaaggaagaagtggatgtaaaagtggaagacaaaaagaacgagatctgcctctcaacaaaacctgtcttccagcccttttctggacaggggcaccgacttggtcgagtgtctcacatcaaagattttatcgaaaagtaccaggggagccagaggagcccccctttctcactggccacagccctgcccgtgctcaggctgttagatgaaacactgaccttggaggaagccgatctacaaaacgccgtgatcatccagcggctccagaagactgctagttttagggagctgtcggagcactag

SEQ ID NO: 31278 - DNA, 1359 bp, synthetic construct
  source 1..1359: mol_type = other DNA; note = Synthetic coding sequence
atgcgcggttgtagctatggcctatgccggaggggactcctgttctgcgttattctggacgatcagagcggaaaaaaaagcgtcaacgacaagaacctcaagaaaaccgtcgaagacgaagatcaagattcagaagaagaaaaagacaacgactcctacattaaggagcgctcagatattccttccggtacatccaagcatcttcagaagaaggcaaagaaacaggccaagaaacaagccaaaaaccagagaagacagcagaagatccaggggaaagtcctgcacttaaatgatatatgtaccatcgatcatccagaggattcagagtacgaggccgaaatgtctttgcaaggagaagtgaatattaagagcaaccatatctcgcaggagggggtaatgcataaggaatactgtgtcaaccagaaagacctgaatggtcaagctaaaatgattgagtcagtaacggacaatcagaagagcacagaagaagttgatatgaagaacatcaatatggataacgacttagaggtactcacctcttccccgacccgaaacctgaatggagcctatctgactgaggggagcaacggggaagttgatatcagcaacgggttcaagaacctcaatctgaatgcagctctgcacccagatgagatcaacattgagatcttaaacgactctcatactccaggcactaaggtttacgaggtggtgaacgaagaccctgagacagccttttgtacactggccaaccgggaggtgtttaacacggatgaatgcagtattcagcattgtctgtaccagtttacgaggaatgagaagctgcgcgatgcgaacaagttgctctgcgaggtttgcacaaggaggcagtgcaatggtccaaaggctaatattaaaggtgagcgtaaacacgtttatacgaatgccaagaaacagatgttgatttcgctagctcctccagtcctgacactccaccttaaacgtttccaacaggccggtttcaatctccgtaaagttaacaagcatattaagttccctgagatcctcgatttggccccattttgtaccctcaagtgcaagaacgtggccgaagagaatacacgggtgctgtacagtctgtatggggtcgtggagcactccggaactatgaggtccggccactatacggcttatgcaaaggctaggaccgctaactcacacttgtcaaatctggttcttcacggcgacatcccccaggactttgagatggagagcaaaggtcaatggttccacatttccgatacacacgtccaagcagtcccaacaaccaaggttcttaacagccaggcctatctcctattctacgagcgcatcttgtag

SEQ ID NO: 31279 - DNA, 450 bp, synthetic construct
  source 1..450: mol_type = other DNA; note = Synthetic coding sequence
atggagcgcattgagggggctagcgtgggaaggtgcgctgccagtccatacctgcggccattgacgctgcactaccgccagaatggtgctcagaaatcttgggatttcatgaaaacccacgacagtgtgaccgtgctcctcttcaattcaagccgccgttccttggtcctggtaaagcagtttcgacctgctgtttacgcaggcgaggtggagaggcgattccctggctcactggctgcagtggatcaggacggcccacgggagctacagcctgctcttcccggaagcgctggagtgactgtggaactctgtgcaggactagtggaccagcccggactgagcctggaagaggtggcttgtaaggaggcctgggaagagtgcgggtatcacttagcccctagcgatctgcgtagggtggccacctattgggatgccacgatgggctcctag

SEQ ID NO: 31280 - DNA, 489 bp, synthetic construct
  source 1..489: mol_type = other DNA; note = Synthetic coding sequence
atgaactcgaacgcctctgaacacactggaatgcttcgcacatgttggtctcattcccactgggacccattctcctccgggagcgtgaccgccatgtgggcaacacacagtcctactagcaaagcctgggcgggaatccaaggccgagggagatgggctctggggtttccctggagaggacagggtgtactgcacgtgatcgcttcacagaaggccgctgtcaccgaagccgtggatttgcgaacgggcgcagcaagccaggcaatgtcagaagcttttgtaagaagcggcatgttttacctgcgccctgcattcgtgctgctctgctacaaatggggaaagctcaggcattcagaagtttcgaatttacttggagtagcctggcccgttagtgaagaagcttgtatggggacgtggggctctctggcagttgcagtcacattacccgctcaggggctggggacttgggggagagacgaaggagagtag

SEQ ID NO: 31281 - DNA, 1320 bp, synthetic construct
  source 1..1320: mol_type = other DNA; note = Synthetic coding sequence
atggtcccgagccgggaggccctcttggggcctggaacaactgcaatccgctgccccaaaaagctgcagaaccagaactataaagggcatggcctgtccaaggggaaagagcgtgaacaacgggcttcaataagattcaagaccactttaatgaataccctcatggacgtattgcggcacaggcctggatgggtagaagttaaagacgaaggcgaatgggatttctattggtgcgacgtctcctggttgcgggaaaactttgaccacacttacatggatgagcatgtccgcatttctcacttccgcaatcattatgagctgaccaggaaaaattatatggtgaagaatctgaagcgattccgcaaacagctggagagggaggccggaaagctggaagctgctaaatgtgactttttcccaaaaacgtttgaaatgccatgcgagtaccatttgtttgttgaagagtttcggaagaatccaggtataacctggatcatgaagcccgttgccagaagtcaggggaaaggtattttcttgtttcggcgacttaaagacatcgtcgactggaggaaggatactaggagctcagacgaccagaaggatgatattccagtggaaaattacgtggctcagagatatattgaaaatccctatctcatcgggggacgtaagtttgacttgagagtttacgtcctcgttatgtcagtcttcgcagaatgccttctctggtctggccacaggcgccaggacgtccatcttacaaacgtggccgtgcagaagacttctcccgattaccatccaaaaaaagggtgcaaatggaccctgcaaagattccggcagtacctggcatctaagcacggcccagaagctgttgaaaccctattccgcgacatagataacatttttgttaaatccttgcaatcagtacagaaggtgatcataagtgacaagcactgcttcgagctgtacggatacgacatcctgatagatcaggatttaaagccgtggctactcgaggtcaacgcctctccatcgctgaccgcatctagccaggaggactacgaactcaagacctgccttttagaggacaccctgcatgtggtcgatatggaggcacgattaactggccgagagaagcgggtcggtgggttcgaccttatgtggaatgatgggccagtttcgcgagaagaaggagccccagacctgtcagggatgggcaacttcgtaaccaacactcacctgggctgcgtcaatgacaggaaaaaacaactgcgacagctcttttgttcgctgcaggtccaaaaaaaggcctccagctag

SEQ ID NO: 31282 - DNA, 867 bp, synthetic construct
  source 1..867: mol_type = other DNA; note = Synthetic coding sequence
atggccaaatggggcgaaggggaccctcggtggattgtggaggaaagggcggatgccacgaatgttaacaattggcattggaccgaaagggacgcgagtaactggagcacggacaaattgaaaactctgttcctggcagtgcaagtgcagaatgaggagggcaaatgcgaagtaaccgaggttagcaagctggatggggaggcttctatcaacaataggaagggtaagctgatattcttctatgagtggagtgtgaagctcaattggaccggcacgtctaagagtggagtgcagtataaggggcacgtggagatcccaaacctgagcgatgaaaattctgttgacgaggttgagatttctgtctccctcgccaaggacgagcccgacaccaacttggtggcactcatgaaggaggagggcgttaaactgctgagggaggcaatggggatctacatttcaaccttgaagactgagttcacgcagggcatgatcttgccaaccatgaacggggagtctgtcgacccagtgggacagcccgcactcaagacagaagaaagaaaagctaagcctgctccatcaaagacccaggctcgaccggtcggagtaaaaatacccacgtgcaaaatcacgctgaaggaaacgttccttacctctcccgaggagctctaccgcgtgtttacaacacaggagctggttcaggcattcactcacgcccctgctacactcgaggccgaccgcggagggaagtttcatatggttgacggaaacgtgtccggcgagttcacggacctcgtgcccgaaaagcatatcgtgatgaagtggagatttaagtcatggcccgaaggctcgcattgtcattccggatag

SEQ ID NO: 31283 - DNA, 1053 bp, synthetic construct
  source 1..1053: mol_type = other DNA; note = Synthetic coding sequence
atgcccagcttcatccgccatggacctactatcccacgaaggactgatatctgcctcccagatagctcacccaacgccttctctacctctggcgacgtggttagccgtaaccaaagttttctgcggacaccaatacagaggacccctcatgaaataatgagacgggaatcaaatagactgtctgcccctagctatttagcgaggagcttggctgacgtcccgcgagaatatggctcctctcagagtttcgttaccgaagtctcattcgctgtggaaaacggggattctggctctaggtactactacagcgacaactttttcgatgggcagaggaagcgacctctgggggaccgggcacatgaagattaccggtattacgagtataatcacgacctgtttcagcggatgccccagaaccaaggtaggcatgcatcggggatagggcgagtcgcagcaactagtctgggcaacctaacaaaccacggatccgaagacctgcccttgccacccggttggtccgtcgactggaccatgagaggcagaaagtactatatcgatcataacacaaatactactcactggtcccaccctctggagagagagggccttcctcctggctgggagagggtggagagttccgagtttggcacttactacgtcgatcacacgaacaagaaagctcagtaccggcacccttgcgcaccatctgtgcctagatatgaccaacctccgccagttacataccagcctcagcagacagagcgcaaccaaagcctgctggtgccagctaatccataccacaccgctgagatccccgattggcttcaggtgtatgctagagccccagtgaagtatgatcacattctcaagtgggagctgttccaactcgccgatctggatacctatcagggaatgctgaaattgttgtttatgaaagaactcgagcagatcgttaagatgtacgaagcttatagacaggcactgttgactgaacttgagaatcgtaagcagcggcagcagtggtacgcccaacagcatggcaagaacttctag

SEQ ID NO: 31284 - DNA, 537 bp, synthetic construct
  source 1..537: mol_type = other DNA; note = Synthetic coding sequence
atgactttcagagagggccatcagtgggagaagattcctctgagcgggagtaaccaggagattaggcgtcagaaggaacggatcaccgagcagcccttgaaggaagaagaggacgaggatcgaaaaaataagggtcatcaagctgccgaaattgagtggctcgggtttcggaagccttcacaggctgacatgctgcactcgaagcatgacgaggagcaaaaggtctgggatgaggaaattgacgacgacgacgatgataattgcaacaatgatgaggatgaagtgagggtgattgagtttaagaagaaacatgaggaggtcagtcagttcaaggaggagggggatgcctcagaggactcacccttatcctccgcctcatcccaagccgtgacaccagatgagcagcctaccttaggcaaaaagtccgacatctcccggaacgcatattccagatacaatactatcagttacaggaaaatccggaaggggaacactaagcaacgaatcgacgagtttgagtccatgatgcatctgtag

SEQ ID NO: 31285 - DNA, 312 bp, synthetic construct
  source 1..312: mol_type = other DNA; note = Synthetic coding sequence
atggcagcctttaaactggacttcctgcccgagatgatggtggaccactgctcgctcaacagtagtcctgttagtaagaagatgaatggcactctggatcacccagatcagccggatctggatgccatcaagatgttcgtcggccaggttccccgaacctggtctgagaaggatttaagggagctcttcgaacagtacggagccgtgtatgagatcaacgtgcttcgggatcgatcacagaacccaccccagtctaaggggtgttgtttcgtgaccttttatactaggaaggccgcacttgaagcccagtag

SEQ ID NO: 31286 - DNA, 1917 bp, synthetic construct
  source 1..1917: mol_type = other DNA; note = Synthetic coding sequence
atgccacccattaacctgcaggagaaacaggtgatctgtctgtcaggagatgacagttctacttgcataggaatcctggcaaaagaggttgaaattgtcgccagcagtgatagcagcatctcatctaaggcacggggaagtaacaaagtcaagatccaaccggttgctaagtatgattgggaacagaagtattactatggaaacctcattgctgtatctaactcattcctggcgtatgctattcgggctgcaaataatggaagcgcaatggtgcgggttatctctgtgagcaccagcgaacgcactttacttaaaggcttcaccggttcagtcgccgacctggcctttgcacatctgaacagtccacaactggcatgtctggacgaagccggaaacctcttcgtttggaggttggcgctggtcaacggcaagatccaggaagagatcctcgttcacattaggcaaccagagggaacaccactcaatcacttccggagaataatttggtgcccatttatcccggaagagagtgaggactgctgcgaggaatcttcccccacagtcgcccttctgcatgaagatcgggcagaggtgtgggaccttgacatgttgcgcagtagccatagtacatggccagtcgacgtttcgcaaataaaacagggctttatcgtggtgaagggtcactccacatgtctctctgaaggcgcactttcccctgatggcaccgtgctggctaccgcaagccatgatggatacgtaaagttctggcagatctacattgagggccaggacgagccaaggtgtctccacgaatggaaaccacatgatgggcgtcctctgagttgtctgctgttttgtgataaccacaaaaagcaggatcctgacgtccctttctggcggtttctgattacaggagctgaccagaaccgggaacttaaaatgtggtgtaccgtgagctggacttgcctccagaccattaggttctctcctgatattttcagctccgttagcgttccaccttctctcaaggtttgcctcgacctaagtgctgaatatctcatcctgtcggacgtgcagcgcaaggtgctctatgtaatggagctgcttcagaatcaggaggaaggacacgcctgctttagctcaatttctgagtttctcctgactcatcccgtgctaagcttcggtatccaggtggtctccaggtgtcgtctgcgccatacagaggtcctccccgctgaggaagagaacgattctttgggtgccgacggaactcacggggcaggagcaatggaatcagctgcaggggtactcataaagctcttctgtgttcacaccaaggctctgcaggacgtccagattcggtttcagcctcaacttaaccctgacgtggtggcgcctctaccaacccatacagcccacgaagatttcactttcggcgaatcacggccagagctgggatccgaagggctgggcagcgctgcccatgggagtcaaccagacctcaggcggattgtagagttgccagctcctgccgacttcctgtctctgagttctgagactaagcccaagttaatgacccccgacgcattcatgaccccatctgcaagcctccagcagatcaccgctagcccgtctagctccagcagcggctcctcatcctcctcctcttccagttcatcttctctgacagctgtgtcagccatgtccagcacatccgcagttgacccctctctcacccgaccgcctgaagaactgacgctgtcaccaaaactgcagctcgatgggtccctgaccatgtcttcttcaggaagtctccaggctagccctcgtgggctgttgcctgggctgctgccagctcccgctgacaaattgactcctaagggacctggacaggtctgtgattgggtttgtgtctag

SEQ ID NO: 31287 - DNA, 495 bp, synthetic construct
  source 1..495: mol_type = other DNA; note = Synthetic coding sequence
atgcgaatactcatacttgggctagacggagccggaaagactaccattctgtacagactccaggttggagaggtcgtcactacaatacctactatcggcttcaatgtggaaactgtgacttataaaaaccttaaattccaggtgtgggatctcggaggccagacatcaattcgtccttattggcggtgctactatagtaacacggatgccgtcatatatgtcgttgacagctgcgatagggatcgcatcgggatcagcaaaagtgaactggtggcaatgcttgaggaagaagagctgcggaaagcaattctggttgtgtttgccaataagcaggatatggaacaggccatgacatcaagtgagatggcaaattccctgggcttgccggctctgaaagatagaaaatggcagatttttaagactagcgctacaaaaggaaccgggctagacgaggccatggaatggctggtcgagaccctgaaatcccgccaatag

SEQ ID NO: 31288 - DNA, 1944 bp, synthetic construct
  source 1..1944: mol_type = other DNA; note = Synthetic coding sequence
atggcacagggcagcgtgtcctttaacgacgtgacagtcgattttacccaggaagaatggcagcaccttgatcatgcccagaagaccctctacatggacgttatgctagagaattattgccacctcatttcggtcggctgtcatatgaccaaaccggacgtgatcctaaagctcgaaagaggcgaggaaccttggacttcatttgccggacacacatgccttgaggaaaactggaaggccgaagatttcctcgttaagttcaaggagcaccaggaaaagtattctcgcagtgtggtctcaattaatcacaaaaagctggtgaaggaaaaaagcaagatctatgagaaaacatttacgctcggaaaaaacccagtcaatagtaagaatctgcctcccgaatatgatacacatgggaggatcctcaagaacgtgtctgaactgataatcagcaacttgaatccagctcggaagcggctatctgaatacaatggatacggcaagtcactgttgtctaccaaacaggagaccactcatccggaggtcaagagtcacaaccaaagcgctagggcgttctcacacaacgaggttctgatgcagtaccagaagacggagaccccagcccaaagcttcgggtacaacgactgcgaaaaatcttttctgcagagaggaggtctcataacccatagtaggccttacaagggcgagaatccgtccgtgtacaataagaagagaagagctacaaatatagaaaagaagcacacatgtaacgaatgtggcaagtcattttgcagaaagtccgttttgattctccaccaagggatccacagtgaagaaaagccctaccagtgtcatcaatgtggcaatgcctttagacgaaagtcctatctcattgatcaccagcggactcatactggggagaaaccttttgtgtgtaacgagtgtggaaagagctttcgcctcaagaccgcgctgaccgatcaccaaaggacccataccggtgaaaaatcctacgagtgtttacagtgccgcaatgcattccgcctcaagagtcatctgatccgacatcagcggacacacactggggaaaaaccctacgagtgtaacgactgcggcaagtcttttagacaaaagaccaccctgagtctgcaccagcgtattcacacgggggagaaaccctacatttgcaaagagtgcggcaagagttttcaccaaaaggctaatcttacggtgcaccagcggacgcacaccggggaaaagccttatatatgcaacgagtgtggtaagagcttctctcaaaagacaaccctggccctgcacgagaaaacacataatgaagaaaagccctacatctgttcggaatgtggcaagtccttcagacagaagacaacacttgtggcacaccagaggacccacactggagaaaagagctacgagtgcccccattgcgggaaagcctttagaatgaaatcctacctgattgaccaccatcggacacacactggagagaagccctatgaatgcaacgaatgcggcaagagtttttcccagaagaccaaccttaacctgcaccagagaatccacacaggagagaaaccttacgtctgtaacgagtgcgggaaatctttccgtcagaaagccacgctgacggtccatcaaaaaatccatactggtcagaaatcatatgagtgcccccagtgtgggaaagccttctctcggaaaagttacctcatccaccaccagcggactcatactggggagaagccctacaaatgcagcgaatgtggaaagtgtttccgtcaaaagaccaatctgattgtccatcagaggactcatacaggggagaagccttatgtgtgtaatgaatgcggtaaaagcttctcctacaaacggaatttaatcgtccatcagcgtacacacaagggtgaaaatattgaaatgcagtag

SEQ ID NO: 31289 - DNA, 3570 bp, synthetic construct
  source 1..3570: mol_type = other DNA; note = Synthetic coding sequence
atgaaactcgaatgtattcctgcgcctattaccccctccacggtgccatcctttccacccaccccccctacccccccagcatccccaccccacacgccagtaatagtccctgctgcggctaccacagtgtcatccccaagcgctgcgataacagttcagcgcgtgttagaggaggacgagagcatccggacttgcttatctgaggacgccaaagagattcagaacaagattgaagtggaagcagacggtcagaccgaggagatcctggattcacagaatttgaactcaaggaggtcgccggtcccagcccagattgctatcaccgtgcctaagacttggaagaaacctaaagatcggacccggaccactgaggagatgctagaggccgagctcgagttgaaggcagaggaggagctctcaattgacaaggtgctcgaatcggagcaggacaagatgtcccagggtttccatccggagcgggaccctagtgacctgaaaaaagttaaagctgtggaggagaatggcgaagaggccgagccggtaagaaacggcgcagagagtgttagtgagggggaggggattgacgcaaatagcggatcaactgacagcagtggtgacggcgtgaccttcccatttaagcccgaatcatggaagccaacagacacggagggaaagaagcagtatgatagggagttcctgctagacttccagttcatgcccgcttgtattcagaaacctgaaggtctgccacctatttcagacgtggtcctggacaagatcaaccaacccaagttgcccatgaggacacttgacccccgtatcctgcctcgcggacccgacttcactcccgcatttgcggacttcggcagacagaccccaggcggaagaggggtccctcttctcaatgttggttcccggagaagccagcctgggcagcggagggaacccagaaagatcataaccgtgagtgtcaaggaggatgttcatctgaaaaaagccgagaatgcttggaaaccgtctcagaaacgagatagccaagccgatgatcctgagaatatcaaaacacaggagcttttccgcaaagtgcggtctattctcaacaagttgacgccccaaatgtttaaccagctcatgaagcaggtaagtgggctcacagttgatacagaagaacggctcaagggggttattgacctggtgttcgaaaaggctattgacgaaccatctttttcagtggcctacgccaatatgtgtaggtgtttggttacacttaaggtgcccatggcagacaagcccggaaacactgtcaactttcgcaagttgttgttgaatcgctgccagaaggaattcgagaaggataaagcggacgatgacgtgttcgagaagaaacagaaggagttagaggctgcatcagcgcctgaagagagaacacggctccatgacgaactggaagaagcaaaggataaggcaagacgcaggtcgatcgggaatatcaagttcatcggggagctgttcaagctgaagatgctgactgaggcaatcatgcacgattgcgtggtcaaactcctcaagaatcacgatgaagaatctcttgaatgtctctgccggcttttaaccacaattggtaaagacctggacttcgagaaggccaagcccagaatggatcagtattttaaccagatggaaaaaatcgttaaggaacgaaaaactagctctcgcataaggtttatgcttcaggatgtcatcgacctgcggttatgcaactgggttagcagaagagcggatcagggcccaaaaacaatcgaacagatccataaggaggcaaagatcgaggaacaggaggaacagcgcaaggtgcaacaactcatgacaaaagaaaaaaggcgcccaggtgtacagagggtggacgaggggggatggaataccgtccagggagcgaaaaattctagagtgctggatcccagcaaatttctgaaaatcactaaacccacaatagacgagaagattcagctcgtcccaaaagcccaactgggcagctggggcaagggctctagcgggggtgctaaggcttccgagacagacgcccttagatctagcgcctcatctctgaatagattctcagccctacagccgcctgcgccttcaggatccaccccatcgacaccagtggagttcgatagcagaagaacattgacatctagaggcagcatgggcagggagaagaacgataagccactgccaagcgcaactgccaggcccaacacctttatgcggggagggtcatccaaagatctcctcgataatcaaagccaggaagaacagaggagagaaatgctggagactgtcaaacagctgacaggcggagtggacgtggagcgaaactccaccgaagccgaacgaaacaagactcgggaaagtgccaagcctgagatttccgccatgtccgcacacgataaagctgccctgagtgaggaagagcttgaaagaaaaagcaagtcaatcattgatgaattcctgcacataaacgatttcaaggaagccatgcagtgcgtggaggagctcaatgctcaaggactgctgcatgtatttgtgagagtcggtgtcgaatctacactcgagcgtagccagatcactcgcgatcacatggggcagttgttatatcagctggtacagagcgagaaattaagtaagcaggactttttcaagggtttctccgagactcttgaactggctgacgacatggctatagatattccccatatctggctttacctcgccgaactcgtaactcctatgttgaaagagggaggaatttcaatgcgggagctcaccattgagttcagcaaacccctgttacccgtcgggcgtgctggagttctcctttccgagattctgcacctgctgtgcaagcaaatgtcccacaagaaggtcggcgctctgtggcgcgaggctgacctgtcatggaaagactttttgcctgaaggagaagacgtacacaatttcctcttggagcagaagctcgatttcattgaaagtgatagtccttgcagttcagaggccctctcaaagaaggaactgagtgctgaagaattatacaaacgtttagagaaacttattatcgaggataaggcgaacgatgaacagatctttgactgggtcgaggccaatcttgatgagatccagatgtcttcacccaccttcctgagagcactcatgaccgcagtgtgtaaggccgcaatcattgccgacagcagcaccttcagagtcgacacagctgtgattaagcagcgggtacccatcctgcttaagtacctggactccgataccgagaaggagctgcaggctttgtacgctttgcaggcttccattgtcaaattggatcaacccgctaaccttctccggatgttctttgactgcctttacgacgaggaagttattagcgaagacgccttctacaaatgggagagctccaaggaccccgcagagcagaacggaaaaggcgtggcattaaaaagcgtgactgctttctttacctggctcagggaggcagaagaggaatccgaggataattag

SEQ ID NO: 31290 - DNA, 591 bp, synthetic construct
  source 1..591: mol_type = other DNA; note = Synthetic coding sequence
atgtggtctgtattgcaagacggcccaatttctcgggtgatcgtgttctccctatcggcagccaaagagacaaaagatagacctctccaagacgagtattccgtgctggtagcctccatgctcgagcctgccgtagtttatcgagaccttctgaacagaggacttgaggaccaactgttgctaccgggaagcgaccagttcgatagtgtgctctgctctctcgtgacagacgtagacctagatgggagaccagaggttctggttgccacttacggacaggagctgttgtgttataagtatcgcggtcctgagagcggtctgcccgaggctcaacatggatttcatctgctgtggcagagaagcttctcgtcccctctgcttgctatggctcacgtggatcttacaggtgatggattgcaggagttggctgtcgttagcttaaaaggagtacacatactgcaacattctctgatccaagcttctgaattggtgctgacgcgcttgcgccatcaagtcgagcagcggcgacgcaggctgcagggtctggaagatggagccggagctgggccagccgaaaatgctgcaagttag

SEQ ID NO: 31291 - DNA, 1056 bp, synthetic construct
  source 1..1056: mol_type = other DNA; note = Synthetic coding sequence
atggtgagtcacacgttccatatgagaacagaagagagcgatgcgagtcaggagggggatgatcttcctaagagcagcgcaaacacctctcaccccaaacaagatgacagccctaaatcatctgaagaaacaatccagcccaaggagggggacatacccaaggccccagaggaaactatccagtccaaaaaggaagacctaccgaaaagcagcgagaaggcaatacaaccgaaggaaagcaacattcctaaatctagtgcaaagcccatccagccaaagttaggcaatataccgaagacctccgtgaagccctctcagcctaaagagagcgacattccaaaatctcccgaggaggctattcagcctaaggagggggacattccgaaatccctggaagaagcaatccagcccaaagaaggcgacataccaaagtcaccagaggagactattcagccaaagaaaggggacattcccaagtcccctgaagaagccattcagccaaaggagggcgatatacccaaatcaccaaaacaggccattcaaccaaaagagggcgacattcccaagtctttggaagaagcaattccacccaaggagatcgatattcccaaatcccccgaggaaaccatacagcccaaggaagacgatagtcctaaatcactggaagaagccacaccttcaaaggagggggatatacttaaacccgaagaagagacgatggagtttccagagggtgacaaggttaaggtgatcctgagcaaggaggatttcgaggcctctctgaaagaggcaggggagaggctcgtcgccgtcgatttctcggccacatggtgcggcccttgtagaacgattaggccattttttcatgcgctttcggtgaagcatgaagatgtggtctttttggaagtggatgcagataattgcgaagaggtagtgcgggagtgcgctattatgtgtgtccccacattccagttctacaagaaggaagaaaaagtcgacgagttatgcggggcactgaaagagaaactcgaggcggtgattgcggagttgaagtag

SEQ ID NO: 31292 - DNA, 1473 bp, synthetic construct
  source 1..1473: mol_type = other DNA; note = Synthetic coding sequence
atgccggacggcaagatccagaagcttatcattaccgaggaaaccgctaaaattaggccttttgcagtagctgctgtgctgagaaacatcaaattcaccaaagatcggtatgacagtttcatcgaactgcaagaaaagctgcaccagaatatatgccgtaagcgtgccttagtcgccataggcacacacgacctggataccctgtcaggccctttcacatacaccgccaaaagaccttctgatattaaattcaagccactcaataaaaccaaggagtataccgcctgtgaactcatgaacatatacaagacagataatcacttaaagcactatttgcatatcatcgaaaataagccactatacccagtcatttatgacagcaacggcgtagtgctgtccatgccacccatcataaatggcgaccactcacgaatcaccgtcaatacgaggaatattttcatcgaatgtacaggaacagatttcacaaaagccaagatcgtgctcgatattatagtgactatgttctccgagtactgcgagaatcagtttacagtggaggccgcagaggtagtcttccctaacggtaagtcccacacattcccagaactggcttacaggaaggagatggttcgggctgatttaatcaataagaaagtgggaatcagggaaactcccgaaaatctcgcaaagctgttgacaaggatgtacttgaaatctgaggtcattggggacgggaatcagatcgagatagaaatacccccaacgcgcgcagacatcatccatgcctgcgatatcgtcgaggatgctgcaattgcatacggctacaataacatccagatgaccctccccaaaacttatacgatcgccaaccagtttcctctaaacaagctaacagaattgttaaggcatgacatggccgctgcagggttcacagaagccctaacgttcgcgctttgctctcaggaggatatcgctgacaaattgggtgtggacatatccgctactaaggccgtccacattagtaatcctaagacagcggagttccaggtggctcgaaccacacttctgccgggactcttaaaaacgatcgcagccaatcggaaaatgcccctccccttgaagctctttgaaatcagcgacatagtaataaaggattccaacacagatgtaggggcaaagaattaccgtcatctctgcgcagtgtactataataagaatccaggtttcgagattatacacggtcttctcgatcgcatcatgcagctgcttgacgtgcctcctggggaagacaaaggtggctatgtgataaaggcatccgagggccctgccttttttcccggacggtgtgctgagattttcgctcggggacaatccgtgggaaagctgggagtgctacaccctgacgtcattactaaattcgagctcacaatgccctgttctagcctcgaaatcaatgttgggcctttcctctag

SEQ ID NO: 31293 - DNA, 1458 bp, synthetic construct
  source 1..1458: mol_type = other DNA; note = Synthetic coding sequence
atggcagcagaattgtacgcccctgctagtgctgctgcagccgacctcgcgaattccaacgccggtgcggcagtcggcaggaaagccggacctagaagccctccgtccgcaccggcacccgctccaccaccccctgccccagcacctcctacactgggcaacaatcaccaagagtcaccagggtggcgctgttgtcgcccaaccctgcgagagcgcaatgctctgatgttcaataacgaactgatggcagatgtacattttgtagtgggtcccccaggcgctactcgaaccgtgcccgctcacaaatatgtgttggcggtcgggtctagcgtgttctatgccatgttctatggagacctggcggaggtgaagtctgagattcacattccagacgtcgagcccgcagcttttctgatactgttgaagtatatgtatagcgatgagatcgatctggaggcggataccgtcctcgctaccctctacgcagccaagaaatatatcgtccctgccctagcgaaggcttgcgtgaatttcttggaaacttccttagaagccaagaacgcctgtgtcctgctgagccagtctcgcctctttgaggaacctgagttaacacaaaggtgttgggaagtcatagacgcccaagctgagatggcactccgttccgaaggattttgcgaaattgaccgccaaaccctcgagattatcgttacccgggaagccttgaatacgaaagaggccgttgtcttcgaggctgttcttaactgggcagaggccgagtgcaagcgccagggtctgcccatcacacccaggaataaacggcacgtactcggtcgggctctgtatcttgtccggataccaaccatgacactggaagaatttgccaatggggctgctcagtctgacatcctgactttggaggagacgcactctatattcctgtggtataccgccactaataaacccagactagatttccctctcacgaaacgcaagggactcgcaccacagcgctgtcatcgcttccagtcatccgcttatcggtccaatcagtggcgctaccggggtcgatgcgactccatacagttcgcggtggacagacgagtgtttattgccggattgggcctgtacggctcaagtagcggaaaggccgaatatagtgttaagattgaattaaagaggctgggcgtggtcctggcccaaaatctgaccaaattcatgtccgacggctcctcaaacacctttcctgtgtggttcgaacatcctgttcaggttgaacaggacactttttacaccgcttccgcagtgctagacggatctgagctgagttattttggccaagagggaatgactgaggtccaatgcggcaaggtggcttttcagttccaatgtagcagtgattccaccaacggtacaggagtccaaggcggtcagatcccggaattaattttttatgcatag

SEQ ID NO: 31294 - DNA, 204 bp, synthetic construct
  source 1..204: mol_type = other DNA; note = Synthetic coding sequence
atggcccttctcgcagagcacctcctgaaaccactcccagctgataaacagattgaaacagggccattcctcgaagctgtgagccaccttccccctttctttgactgcttaggctctcccgtgtttacgccaatcaaggctgacatttccggcaacataactatgaggaagcttaggctgcgtggggtcgaaggcctggcatag

SEQ ID NO: 31295 - DNA, 816 bp, synthetic construct
  source 1..816: mol_type = other DNA; note = Synthetic coding sequence
atctgtgagcgcatcaggtccactgttgacgagaaagaacagaaacagctgctgatggatttggatgtggtgatgcgctcttccgactgcccctatatcgtccaattttatggcgctttatttcgtgaaggcgattgctggatttgcatggagctgatgagcacttcatttgataaattttacaaatacgtgtatagcgtgttggatgacgtaatccctgaagaaatacttggcaagatcactcttgctacagtgaaagctcttaaccatctcaaggaaaacctcaaaatcattcatcgcgatatcaagcctagcaacattttgctggacagatccggcaacatcaagttatgcgatttcggcatttcaggacaattggtcgacagcattgccaagactcgggatgccggatgtcgcccatacatggccccagagagaatcgacccttccgccagcaggcaaggctacgacgtgcgcagcgacgtgtggagtctcggaatcaccctgtacgagctggccacaggccgtttcccttacccaaagtggaacagtgttttcgaccagctgacgcaagtggtgaagggcgacccgcctcagctctccaattctgaagagagagagttttcccccagcttcattaactttgtgaatctgtgcctaaccaaggatgaaagtaaaaggccgaaatacaaggagttgcttaagcacccatttatactgatgtacgaggagagagcggtcgaggtggcatgttacgtatgtaagatactggaccaaatgcccgcaaccccatcatccccaatgtatgtggactag

SEQ ID NO: 31296 - DNA, 291 bp, synthetic construct
  source 1..291: mol_type = other DNA; note = Synthetic coding sequence
atgagtgagaaggtggattggttgcaatctcagaatggggtgtgtaaagtagacgtgtactcgcccggagacaatcaggcgcaggattggaagatggacaccagcaccgatcccgtgagggtactctcctggctgcgaagggaccttgaaaagtcaactgccgagttccaggacgtacgatttaagcctggggagtcctttggtggtgagaccagcaactccggggacccacacaagggcttctctgtcgattactacaacacaaccacaaaaggcactcctgagagatag

SEQ ID NO: 31297 - DNA, 792 bp, synthetic construct
  source 1..792: mol_type = other DNA; note = Synthetic coding sequence
atgttatcctctaagggtctcacagtcgtggatgtgtaccaagggtggtgcggcccatgcaaaccagtcgtatctttgtttcaaaaaatgcgaatcgaagtgggtctggacttattacactttgctttggccgaggctgaccggttggacgtgttggagaagtatagagggaagtgtgagccgaccttcttgttttacgccattaaggatgaggccctgtcagacgaggacgagtgcgtgtcccacggcaagaataacggagaggacgaggacatggtgagcagtgagaggacatgtactcttgcaataatcaagcccgacgctgtcgcccacggaaaaacggacgaaattatcatgaaaatacaggaagccggattcgagattttgactaatgaggagcggactatgacagaggcagaggtgcgacttttttatcagcataaagccggtgaggaagccttcgaaaagttggtgcatcacatgtgctctggtccttcgcaccttttgatcctaacgagaactgaggggttcgaggatgtggtcaccacctggcgcacagtgatgggccctcgagatcctaatgtcgcaagacgcgagcagccagagagcctgcgtgctcagtatggcaccgaaatgccttttaatgcagtacatgggtcgagagatagggaagacgccgacagagagctggcattactctttccctcgctgaagttcagcgacaaggataccgaggcccctcagggagagagttctacacagccgagactgaaaattaccgacctcgactag

SEQ ID NO: 31298 - DNA, 867 bp, synthetic construct
  source 1..867: mol_type = other DNA; note = Synthetic coding sequence
atgtcttcctccatgtggtatattatgcagagcatccagtctaaatactccctttctgaaaggttgattcgcactatcgctgcaatcagaagctttccacacgataacgtggaagaccttattcgcggtggcgcagatgtgaattgtactcatggcacgctgaaaccattacactgcgcatgtatggtctcagatgcagactgtgtcgagctgttattggagaagggcgcagaggtgaacgcactagacgggtacaacagaactgctctacactatgccgcagaaaaagatgaggcatgtgtggaagtgctactcgagtacggggctaatcctaatgccctggacggcaaccgggacactccacttcattgggctgcctttaaaaataacgccgagtgcgttagggcgctgctggagtcgggtgcaagtgtcaacgctctggattataacaatgacacccctctgagttgggcggctatgaaaggcaatctcgagtccgtaagtatcctgttagactatggagccgaggtgcgggtcattaatctcatcgggcagactccaatatcacgcctggtcgccctgcttgtccgcggactgggcactgagaaagaggactcgtgttttgaactcctccaccgcgctgtgggacatttcgaactgcggaaaaatggcactatgcctagagaggtggcccgtgaccctcagttgtgtgagaagctgaccgtgctttgttctgcccctggtacattaaagacccttgccaggtacgccgtgaggaggtcgctcggcctccagtatctgccggacgcagtgaagggactgccactgccggctagcttgaaggagtacctcctcctgctcgaatag

SEQ ID NO: 31299 - DNA, 549 bp, synthetic construct
  source 1..549: mol_type = other DNA; note = Synthetic coding sequence
atgcctatccctccccctcctcctccacccccagggcctcctcccccacctacattccaccaggccaacacggagcaacctaagcttagccgcgacgagcagagaggtaggggagccctcctccaggatatttgcaaaggaacgaaacttaagaaagtgactaacataaacgacagaagcgcccctatcctggaaaccccgcctccgccaccccctgtgatccgcaatggcgctagagacgcccctccgcctccccctccttaccgcatgcacgggagtgagccacccagccgcggaaaacctcctccccctccaagccgtactccagcgggtcccccacctcctccgcctccaccactgcgcaatggtcaccgcgattctataactactgtgcgttcctttttggatgacttcgagagtaagtactcatttcaccccgtggaggactttcccgctcctgaggagtacaaacattttcaaagaatttacccgagcaaaactaatagagccgcacggggtgccccaccgttgccacccattttgcgatag

SEQ ID NO: 31300 - DNA, 999 bp, synthetic construct
  source 1..999: mol_type = other DNA; note = Synthetic coding sequence
atggaccaaccagctggccttcaggtggattacgtcttccggggtgtggaacacgccgttcgtgtgatggtttctggccaggtgctggaactggaagtggaagaccgcatgaccgccgatcaatggcggggagagtttgacgccggttttatcgaagatctgacacacaaaaccggcaacttcaaacagttcaacattttttgccacatgctggagagcgcgttaacacagtcctccgagtccgtcacattagacctgctcacatataccgacctggaaagcttgcggaataggaaaatgggcggtaggccaggcagtctcgctcccaggagtgctcagctgaacagcaaaaggtacttaattctgatctacagtgtagagttcgaccgcattcactacccattgccgttgccatatcaaggaaagcctgaccccgtagtgctccagggaattataagaagtctcaaagaggagcttggccgactacagggactggatgggcagaacactagagataccagggaaaacgaaatttggcatttgcgcgaacagcagcaacaaaggaatcgtctgggctcaggaggctctggtgacggcccttcggtgtcttggtcgcgccagacccagcctcccgcagccctgaccgggagaggggatgcacccaaccgctcacgcaacaggtctagcagtgtcgattctttcaggagccggtgttcatccgcttcctcatgtagcgatcttgaggactttagcgagtctctgagtcggggtggccatcggcgacgaggtaagcccccttccccaacaccgtggtccggctctaacatgaagagcccccctgttgagaggtctcatcaccagaaaagcctggccaattcaggagggtgggtgcccattaaggagtatagctcagagcatcaggccgcagacatggcagagattgatgccagactgaaagcactgcaagaatacatgaatcggctggacatgaggagttag

SEQ ID NO: 31301 - DNA, 516 bp, synthetic construct
  source 1..516: mol_type = other DNA; note = Synthetic coding sequence
atgtcctcaaaaaggacaaaaactaaaactaaaaaaaggccacagcgggctacctccaacgtgttcgccatgttcgaccagtcccagattcaggaattcaaagaggcgttcaacatgatcgaccagaatcgggatggcttcatagataaagaggatctccacgatatgcttgcctccctcggcaagaacccaaccgatgaatacctagatgccatgatgaatgaagcccctgggccaatcaattttaccatgtttctcacgatgtttggtgagaaactgaatgggacagacccggaagatgtaattagaaacgcatttgcctgctttgacgaggaagcgacaggcactatacaggaggactatctgcgagaattgttgacaacaatgggtgatcgatttacagacgaggaagtggacgagctttaccgtgaggcccctatcgacaaaaaaggtaattttaactacattgagtttacccgtatattgaagcatggagcaaaggataaagatgattag

SEQ ID NO: 31302 - DNA, 2391 bp, synthetic construct
  source 1..2391: mol_type = other DNA; note = Synthetic coding sequence
atgagtctggacgacaacctgtcaggcacgtctggcatggaggtggacgacagagtgtcagcccttgaacagcgcctgcagctccaagaggatgaattggccgtgctaaaggccgctcttgcagatgccctccgccgactccgggcttgcgaagaacagggagcggctttgcgggctcgcggaactcccaagggaagggcccctccacgacttggaaccactgcctccgtgtgtcaattattaaagggccttcccactaggactcctctcaacggctcagggccacctcgacgcgtggggggttatgccacatcaccatcttcacccaagaaagaagcaacttccggccgatctagtgtgcgcaggtacctaagcccagaacgactagccagcgttcgtagagaagaccctcgttctaggaccacttcatcaagcagcaattgtagcgctaagaaagaagggaagacaaaggaggttatcttttcagtggaagatgggagcgtgaagatgttcttacgcggtcgtccggtgccaatgatgatacctgacgaactcgcgccaacctattcactcgatactcgatctgagcttccttcttgcagactgaagcttgaatgggtgtacggctatcggggacgggactgtcgagcaaatctctacctgttgcctaccggtgaaatcgtatacttcgtggccagcgtggcagttctgtactctgtggaagagcagcggcaaagacattacctggggcacaacgatgacatcaaatgcctggccatccaccctgacatggttaccatcgcgactggccaggtggccggaaccacgaaggaaggtaaaccgttaccgcctcacgtgcgcatctgggactccgtttccctctcaacactgcacgttctagggttaggcgtttttgatagggcggtgtgctgtgtcggcttcagcaagagtaacggtgggaatttactgtgcgctgtagatgagagtaatgatcacatgctgagtgtttgggactgggccaaggagacaaaggtggtggacgtcaaatgttccaacgaggctgttctcgttgctacatttcatccgaccgatcccaccgttctgatcacctgtggaaagagccacatatacttttggaccctggaaggtggcagtctgagcaagcggcagggactgtttgaaaagcacgagaagccgaagtacgtactctgcgtcaccttcctggagggtggcgatgtggtgaccggggactcaggcggaaatttatatgtgtggggcaaagggggaaatagaatcacacaggctgtgctcggtgcccatgacgggggagtgtttggcctatgcgcgcttcgagacggtacactggtgagcgggggaggcagggaccggcgtgtagttctctggggtagcgactacagcaagctgcaagaggttgaagtgcctgaggattttgggcctgtgaggaccgtagccgaggggcacggtgatactctgtacgttggcactacacggaatagtattctgcagggttctgtccacacaggctttagcttgctggtccagggccacgtggaggaactttggggtctggcgacccatcctagtcgcgcacaattcgttacttgcggtcaggacaaactggtgcatctgtggtctagtgatagccatcagccactgtggtcgcggatcattgaagaccccgctcgttctgcaggattccatccctcaggtagtgtgttggccgtgggtacagtgacaggacgctggctcctcctcgataccgaaacacatgacctcgtcgccatccacacagatggcaacgaacagatctccgtggtttcctttagcccagatggggcatatctcgcggtcggcagccatgacaacctcgtgtacgtgtatacggtagatcagggtggccgtaaggtgagccggctgggcaagtgctctgggcattcttcctttataacccacttagattgggctcaggacagctcttgcttcgtaaccaactcaggcgactatgagattctctattgggatcccgctacctgtaagcagataactagtgctgatgcagtccgcaatatggagtgggcgacagctacatgcgtgctgggcttcggcgtttttgggatttggtcagaaggcgcagatggtacagacatcaacgccgtggcgcgaagtcatgacggcaaactgttggcatccgcagacgacttcggaaaagtgcacttattctcctacccttgctgtcagcctcgtgcgctcagtcataagtacggagggcattctagccacgttaccaacgtcgcctttctctgggatgacagcatggcactcacaactggaggcaaggacacgtccgtcctgcagtggagagtcgtgtag

SEQ ID NO: 31303 - DNA, 1059 bp, synthetic construct
  source 1..1059: mol_type = other DNA; note = Synthetic coding sequence
atggcactgctcgggcaggcacttaagtggcagcagcaccagggactgctccctcctggcatgacaatcgatttatttagggggaaagctgccgttaaagacgttgaggaagaaaagtttccaacacaactcagccggcacatcaagtttggtcagaaaagtcatgtcgaatgtgccagattcagcccagatgggcagtatttggtgactggttcagtcgatgggttcatcgaagtgtggaacttcactacgggaaagattcgcaaggatctgaagtatcaggctcaggacaatttcatgatgatggacgacgcagtgctatgtatgtgcttttccagagacactgagatgctagccaccggagcacaggacggaaagattaaagtgtggaagatccagtccggccaatgcctgcgcagatttgaacgtgctcactctaagggagtcacgtgcctgtctttttctaaggactcttcccagatcctgagcgccagtttcgatcagaccatacgcatccacgggctgaaatccgggaaaacacttaaggaatttcgagggcactcgtccttcgtgaatgaggcaacctttacccaggacggccactacatcataagtgctagcagcgacgggaccgtgaaaatctggaacatgaaaaccacagagtgttctaatacctttaagtctcttggatccacagctggtaccgatataactgtgaacagtgtgatcctgctgcccaagaatccggagcattttgttgtgtgcaacaggtctaataccgtggtcatcatgaatatgcagggacagatcgtgagatccttttcttccgggaagcgagaagggggtgacttcgtgtgttgcgcactttcccccaggggcgaatggatatactgcgtaggggaagactttgtactgtactgcttttcaaccgtgacgggaaaattagaacgcactttaactgtccacgaaaaggatgtcatcggcattgctcatcatcctcatcagaatctgattgccacctattccgaagatggccttctgaagttgtggaagccttag

SEQ ID NO: 31304 - DNA, 951 bp, synthetic construct
  source 1..951: mol_type = other DNA; note = Synthetic coding sequence
atgcaatcgtgggtgcttatctcgaaggagctgatctccctgctccacctgagtttgttgcatttggaggaggataagactacggtctcccaggagtcgcggagggcagagacattggtgtgctgctgtttcgatctgctgaagaaactcagagcaaagctgcagtcgctcaaagccgagcgtgaggaagccaggcacagggaagaaatggctctgcgaggcaaagatgccgcagagattgtcctggaagcgttctgcgctcacgcaagccaacgcatatcccagctggaacaggacttagcctccatgagagaattccggggattgctgaaagacgcccaaacacaactggttggtctgcatgcgaaacaggaggaattagtgcagcaaactgtttctctgacctccaccctacagcaggactggagaagtatgcagctggactacactacctggacagcactactgagcagatcgcggcagctcacagagaaacttacagtcaagagccagcaagctctgcaggagcgggacgtggccatcgaggaaaaacaggaggtctcacgcgtgctggagcaggtgagcgcgcagctggaagagtgtaaaggtcaaacagaacaactggagctggagaatagtcgtttggccactgacctgcgcgcacagctgcagatcctcgcgaatatggattcacagctcaaagaactgcagagtcagcatactcattgcgcccaggacctggcaatgaaagacgagctgctgtgtcagttgactcagagcaatgaggaacaggctgctcaatggcagaaggaagaaatggccctcaagcatatgcaagctgagctgcagcagcagcaggccgtgctggccaaggaagtgcgcgatctaaaggagacactagagttcgcagaccaggagaaccaggtcgctcacttagagctggcttggtag

SEQ ID NO: 31305 - DNA, 597 bp, synthetic construct
  source 1..597: mol_type = other DNA; note = Synthetic coding sequence
atgactcttagatgcttggaaccctccggtaatggcggagaggggacccgcagccagtggggaacagcgggatctgctgaagagccttcgcctcaggccgctagactcgcaaaagcccttagggagctcgggcagaccggctggtactgggggagcatgaccgttaacgaagccaaggagaagctcaaagaagcgccagaggggactttccttatccgcgatagtagtcacagtgactaccttctgaccatctccgtgaagaccagtgcagggccaaccaaccttcggatcgagtaccaagatggtaagttccgcctcgattcgatcatttgtgtcaaatctaaactgaagcaattcgattcagtagtccacctgattgattactatgtgcagatgtgtaaggacaagcgcacgggccctgaagcgcctcgaaacggcacggtgcacctgtatttgacaaaaccactatataccagtgcccctagcttgcagcatctgtgccgactgactatcaacaaatgtactggcgcaatttggggtcttcctctgcccactaggctgaaggattatttagaagaatataagtttcaagtgtag

SEQ ID NO: 31306 - DNA, 591 bp, synthetic construct
  source 1..591: mol_type = other DNA; note = Synthetic coding sequence
atggtgccgcgtccttggtccggcagcccagggccaggagaatgccttcacagtctattgtctgagcggctttggatttgtcgagacatcagcgcccaacggcgatccgctccaggctcccctcgacctagcgactgccagcagctctcgttcctccccggaaaccaacccaccttcctctgtctccaggcactagctgccctagtccccggagtcacccaggtcgataacaagtccggctttctgcagaagagacctcaccggcagcatcccggaatcctgaagctccctcacgtccggctgccacaggccctggcaaacggcgcacagttgctactgttggggtcagccggtccaacgatggagaatcaggttcaaaccctcacctcttacctctggagccgccatctcccggtagagcctgaggagctacagaggcgggcacgccatcttgagaagaagttcctagaaaaccctggtccagatttccagtcgctgttctcaccacagacctacctgagacagagacgcaactttgtagaacaatgttatacgcattacgtgaaattgcccactatcggaaagaactag

SEQ ID NO: 31307 - DNA, 1131 bp, synthetic construct
  source 1..1131: mol_type = other DNA; note = Synthetic coding sequence
atgcctgatgtggttcagacacggcagcaggcttacagggacaaactagctcaacagcaggcagcggcagccgctgcagcggcagcggcagcgagccagcagggaagtgccaagaacggggaaaatacagccaatggtgaggagaatggtgcacacacaatcgctaggatctggaacctctctgagaattcgacttccgggtctacgcagctggtgctgcggcattgcattcgggaaggaggccaagacgtcccatcaaacaaggatgtgaccagcctagactggaattccgagggaaccctgctagctactggctcctacgatgggtttgcacgcatttggaccaaggacgggaacctagccagcactctaggacagcacaaggggcctatattcgccctaaagtggaacaagaaagggaattttatccttagcgccggtgtggataagaccactataatatgggacgcacacaccggggaggctaaacagcaattcccatttcattccgcccctgctctagacgtagactggcaaagcaacaacacctttgcatcttgctctaccgatatgtgcattcatgtttgcaaactgggtcaagacagacccatcaaaacatttcaagggcacacaaacgaggtgaatgctataaaatgggaccctacaggcaatttactcgcgagttgctccgatgatatgactctgaaaatctggtcaatgaaacaggacaattgcgtccacgaccttcaagcgcataataaagaaatttacaccatcaaatggtctccaacgggcccagggaccaataaccccaatgctaaccttatgctggcctccgcctcgttcgacagtactgtcaggttgtgggatgttgacaggggcatttgcatccacactttaaccaaacatcaggaaccagtatattctgtggcctttagtcccgacgggcgatacctcgcaagcggttcgtttgacaagtgcgtccacatttggaacacccaaaccggcgctctcgtgcactcatatcgcggtactggtggaatcttcgaggtgtgttggaatgccgcaggcgataaagtgggtgccagcgcttctgacgggtcagtgtgtgtcctcgaccttaggaaatag

SEQ ID NO: 31308 - DNA, 1116 bp, synthetic construct
  source 1..1116: mol_type = other DNA; note = Synthetic coding sequence
atgcatatcaaatctataatcctcgaaggatttaaatcatatgcccagaggaccgaggtgaatggcttcgaccctttgttcaatgctatcactgggttgaacggaagtggcaagtctaatatactggatagcatttgtttcttactggggatctccaatctctcacaagtacgagcttctaacctgcaggacctcgtttacaagaatgggcaagccggaatcaccaaggcgagcgtttctattacctttgacaattcggacaaaaagcagtctcctctaggcttcgaggtacacgacgaaattacggtgacgcgtcaggttgtgatcgggggacggaataagtacctgattaatggagtcaacgctaataacactcgggttcaggacctgttctgcagtgtcggcctgaatgtgaacaacccgcacttcctcattatgcagggccgtattacaaaggtgttgaatatgaagccgcctgagatattatccatgatcgaggaggccgctggtacaaggatgtatgaatataaaaagatagccgcacagaagactatcgagaaaaaggaggccaagctcaaggagattaaaactatactcgaggaggaaataactccaacgatccagaaactgaaagaggagcggtccagctacctcgagtaccagaaagtgatgcgggagatagagcatctgagtcgcttgtatattgcctaccagttcctcctggctgaggatacaaaagtaagaagtgcagaggagctaaaggaaatgcaggacaaggtaattaagctccaggaagagttgtccgagaatgacaagaaaatcaaagcattaaatcacgagatcgaagagctcgaaaagagaaaagataaagagacgggcggaattttgaggagcctcgaagatgccctggccgaggctcagcgggtgaacactaaatcccagagcgcgtttgatttaaagaagaagaacctggcgtgtgaggagtcaaaacgtaaagagctcgaaaagaatatggtcgaggatagtaagacattggctgctaaggaaaaagaaaagattaagagaaaagccttctggaagtctgctggctcgtgccttgtgatcctggttgattag

SEQ ID NO: 31309 - DNA, 507 bp, synthetic construct
  source 1..507: mol_type = other DNA; note = Synthetic coding sequence
cataagttgcagtccggaattggtcggctgatcctgaaggaggaaatgaaggcaagaagcagctcctatgcagacccctggaccccaccacgctcctccacatcttcccgagaggccttgcacactgccggatacgagatgtccctgaacgggagcccccgttcccactatcttgccgattcagacccactgatttccaaaagcgcatctctcccagcctacaggcgcaacggactgcatagaaccccaagcgccgatctatttcattacgactccatgaatgcagtgaactggggcatgagggagtacaaaatctacccctacgaactactactcgtcacgaccagagggaggaatcgcttacctaaagatgttgaccgaacacgactggaacgacatctgtcccaagaggaattttatcaggtgttcggaatgactatctcagagtttgaccgtttggcactgtggaagaggaacgagctcaagaaacaggcgagactcttttag

SEQ ID NO: 31310 - DNA, 1770 bp, synthetic construct
  source 1..1770: mol_type = other DNA; note = Synthetic coding sequence
atgtccgtttccgtgcatgaaactcggaagtcaagaagctcaactggatcgatgaatgttacactgttccacaaagcttcccatcccgactgcgtcctggcccacctaaatacgctgcgcaagcattgtatgttcaccgacgtgaccttgtgggccggtgatcgggcattcccatgccatagggccgtgctggcggcttcttctcggtacttcgaggccatgttcagtcacggactgagggagtctagggacgacactgtgaattttcaagacaacctacaccccgaagtgctcgaactcctgcttgattttgcctactcttcacgcatcgccattaacgaagagaatgccgaaagcttgttggaggctggagatatgctgcagtttcatgacgtgcgagatgccgcagccgagttccttgaaaagaacctctttcccagcaattgtctcgggatgatgcttctgtcagacgctcaccagtgtaggaggttatatgaattctcctggagaatgtgtttagtacatttcgagacggtgaggcagtcagaggactttaacagcctgagtaaagatacactgctggatctcatctcttccgatgagttggagacggaggatgaaagagttgtctttgaagccatcctgcaatgggtgaaacatgatctggagcctagaaaggtccacctcccagagctgctgaggagcgtgcgactcgctctactgccctctgattgtctccaagaggctgtgagctccgaggctctacttatggcggatgaacgaaccaaattgatcatggatgaggcccttcgttgtaaaacgcgcatcctgcagaacgatggagttgttacatccccgtgcgccagacctaggaaggctgggcatacccttctcatcctgggagggcagactttcatgtgtgataaaatataccaggttgaccataaagccaaagagattattccaaaggcagatctacccagcccaaggaaggaattctcggcaagtgccatcggttgtaaagtgtacgtgacgggcggacgaggatcagagaatggagtctcgaaggatgtgtgggtgtacgatactgtccacgaggaatggtcaaaggccgcaccaatgctgattgccaggttcggtcatggcagtgctgagcttgagaactgcttatacgtggtcggcggacataccagcctggctggcgtctttcccgcaagcccttccgttagccttaagcaggtagagaagtacgaccccggagctaataagtggatgatggtagctccactgagggacggggtgtctaatgccgcagttgtcagtgcgaaactcaaactgtttgtgttcggcggaacttcaatccaccgagatatggtctcaaaagtgcaatgctatgacccatctgagaatcggtggactatcaaagcagaatgtccccaaccctggaggtatactgccgcagccgtgctgggttcccagatattcattatgggtggtgacaccgagtttacagccgcatctgcctatagatttgattgtgaaacaaaccaatggactcgcatcggagacatgactgcgaaacggatgagttgtcatgctttggctagtggtaataaactgtacgtcgtgggtggatattttggaacccaacgctgcaagactctggattgttatgacccaactagcgatacgtggaactgtatcaccactgtgccatattcactcattcctactgcttttgtcagcacatggaaacacctcccagcctag

SEQ ID NO: 31311 - DNA, 1287 bp, synthetic construct
  source 1..1287: mol_type = other DNA; note = Synthetic coding sequence
atgtcaatgcttaagccctcaggtctgaaagcccctactaagattctgaaacccggaagcaccgcgcttaaaactcctacagcggtagtcgcccctgtggagaaaaccatttcatccgagaaagccagttccactcccagcagcgagacacaggaagagtttgtggacgactttagggtgggtgagcgggtgtgggtgaacggtaacaaacccggttttattcagtttcttggtgagacccagtttgccccaggtcagtgggcgggaattgtgctggacgagcccataggtaagaacgatgggtctgtggctggtgtaaggtattttcagtgtgaacctctcaaaggcatatttaccaggccatccaagcttaccaggaaagtgcaggccgaggacgaagccaatggactccagaccacacctgcttcccgggctacatcaccattgtgtacttctactgcctccatggtgagcagttccccatccaccccctctaatattcctcagaagccgtctcagcctgccgctaaggaaccaagcgccacacctcctatctccaatctgacaaagactgcatctgaatctatctccaatttatccgaggcgggatccataaagaagggcgaaagagaactgaagatcggggatagagtcttggtgggaggaaccaaagcaggagtggttcgcttcttgggggagacggattttgccaaaggggaatggtgtggcgtggagctcgatgaaccgctgggtaaaaacgacggagcagtggctgggacccggtactttcagtgtcaaccaaaatacggcctgtttgcacccgttcataaggtgaccaaaatcggttttcctagcacaacacccgctaaagctaaggccaatgctgtgagaagagtgatggccaccacgagcgctagcttaaaacgcagcccttccgccagcagtctttcatccatgagcagtgtggccagttctgtttcctccagaccatcgcgcaccggtcttcacgttctggagctggaagcaaaaatggaccagcttaggactatggtcgaagccgcagaccgagagaaggtcgagttgttaaatcagctggaagaggaaaagaggaaagtcgaggatcttcaattcagagtagaagaggagtccattactaagggggacctggaacaaaagtctcagatctccgaagatcctgaaaacgtccggggacaccttaccgtgtggatctttcctctgctgactaagatcgaccacaggctgaagtgtctgttgatctactcatag

SEQ ID NO: 31312 - DNA, 3483 bp, synthetic construct
  source 1..3483: mol_type = other DNA; note = Synthetic coding sequence
atggtggtgaccctcggcccaggacccgattgtctgatcttggaagcctcccgtcaaccccagctggtacccaaacccgagagaatggccagcgacggcgcaagcgctctgcctggaccagatatgagcatgaagccatctgccgcacccagcccaagccctgcgctgccatttctcccccctacaagcgacccaccagaccacccccctcgcgaacctccacctcagcctatcatgccctccgtgttctctcccgataatccactgatgctgtctgccttcccctcgtctctgttagtgaccggagatggcggtccatgtctatctggagctggcgcaggaaaagttatcgttaaggtaaaaacggagggtggcagcgccgagcctagtcagactcagaactttatcttaacacagaccgctctgaattccactgcccctggaactccatgcgggggactcgaagggcctgcacctccgtttgtaactgcttccaatgtgaagacaatcctcccttcaaaagctgtcggtgtgagccaggagggaccaccagggctgcccccacagccaccaccccctgtggcacagttggtgccaatcgtcccattagagaaagcgtggcccggtccccacggtacaacaggagagggaggacccgtggccaccctttcaaagccatcactgggcgaccggtctaagatatcaaaggacgtgtatgaaaactttcgccagtggcagcgctacaaagccctcgccagacggcacctgagccagagccctgatacagaagctcttagctgtttcctcattccagtattaaggagcttggctcgacttaagcctactatgaccctggaagagggccttccactggccgttcaggagtgggagcacaccagtaatttcgatcgcatgatcttttatgaaatggccgagagatttatggagtttgaggcggaggaaatgcaaatccagaacacccaattgatgaatgggtctcagggactgtcgcctgcaaccccactcaagctcgacccattaggcccactcgcgagcgaggtatgccagcagcctgtgtatattcccaagaaggctgctagtaaaactcgggctcccagaagacgccagcgaaaagcccagagacctcccgctcccgaagccccaaaggagataccccctgaagccgtgaaggagtatgttgacatcatggagtggcttgtgggcacacatctggccaccggcgagagtgatgggaaacaagaagaggaggggcagcagcaagaagaagaaggcatgtaccccgatcctggcctgctcagttacatcaacgaattgtgcagtcagaaggtattcgtctcaaaggtggaggcagtgattcatcctcaatttttggccgacttgctgtcaccggagaaacagagggacccactggcactgattgaggaactggaacaggaggaagggctaacgctagcccagctggtccaaaagagactaatggcactcgaagaggaagaagacgccgaggcacctcccagcttttccggagcacagctagattcaagcccttcagggtccgtcgaagatgaggacggagatggtagacttaggccgagccccggtctgcagggagctggaggagcggcatgtttgggcaaggtgagttcctctggcaaacgcgctcgtgaggtgcacggcggacaggaacaggctctcgattcgcccagggggatgcacagagacggcaacacgttgcctagccccagttcctgggacctgcagcctgaattagctgcgccacagggcacgcctgggcctctcggtgtggaaaggcgcggttctggcaaggttattaatcaggtgtcactgcaccaagatggtcacctggggggagccggtccccctggccactgcctcgtggctgatcggacttccgaagctcttcccctctgctggcagggagggtttcaaccagagtctacaccatctctagatgctggattggccgagcttgcacctctccagggccaaggcctggagaaacaagtgttagggctgcagaaggggcagcagactggaggccgtggagtactcccccagggaaaggaaccgttagcggtcccatgggagggatccagcggagctatgtggggtgacgatagaggtaccccaatggcacaaagttatgaccagaacccaagccccagagctgcaggcgaaagggacgatgtgtgtctgtccccaggggtatggctgagcagtgagatggatgcggtgggtttggagctgccagtgcagatagaagaggtcattgagtctttccaggtggagaagtgcgtgaccgaataccaagaaggatgccagggactgggatccaggggcaacattagcttaggcccaggcgaaactctggtaccgggtgacacggaatcctcagtcatcccgtgcggtggtacagtggcagctgccgctctggaaaagagaaactattgtagtctgcccggaccattgagagccaattcaccacctttaaggagtaaagaaaaccaagagcagagctgcgaaaccgtgggccatccgagcgatctttgggcagaaggctgttttccactgctcgagtccggggactctaccctgggcagcagcaaggagaccttaccaccaacatgccagggaaatttgctgatcatgggcacagaagatgcatcgagtcttcctgaggctagccaggaggccggttcacgaggcaactccttctctccgttattggagaccattgagcctgtcaatattctggatgtgaaggacgattgcggtttgcagctgagagtttcggaggacacgtgcccactcaacgttcattcttatgatccccaaggagaggggcgagtcgatcctgatcttagtaagccaaaaaaccttgctccgctgcaagagtctcaggaatcctatacgacagggacaccgaaggccacaagttcccaccaaggactcgggtcgactttgcctcgcagggggactcggaacgccatcgttccccgtgaaacctccgtgagcaagacacatcggagtgccgaccgggctaagggtaaggaaaaaaagaagaaagaggccgaggaagaggatgaagagctctctaatttcgcgtacctgctggcaagcaaactgtctttgtcccccagggagcaccctctgagtccccatcacgcatcgggtggccaagggtcacagcgggcatcccacctccttcctgctggcgcaaagggcccaagcaagcttccttaccccgtggcaaagagtggaaaaagggcattggccggagggcctgccccaaccgagaaaaccccacattcgggggctcagctcggcgtccccagggagaagcccctggccctgggcgtagtccgccctagccaaccccgtaagcggaggtgcgacagtttcgtgaccgggaggcggaaaaagcggcgtaggagccagtag

SEQ ID NO: 31313 - DNA, 1548 bp, synthetic construct
  source 1..1548: mol_type = other DNA; note = Synthetic coding sequence
ctcaatagccagtgccgaaataaaaatccattcgccgctggtccgaggccccctcaccatcagttcttccagcgtcctcagatacagccccctcgcgcaaccatccccaatagttccccatccattaggccgggtgcccaaactcctaccgccgtctatcaggcaaaccagcatatcatgatggtaaatcacctcccaatgccctatcctgtaccccagggcccacagtactgcatcccccagtaccggcacagcggcccaccctacgtcggcccaccgcagcaataccccgtgcaacctcccggtcctgggcctttttaccctggccctggcccaggggattttcctaatgcctacgggaccccgttttatcccagccagccagtgtaccaaagtgcacccattattgtgcccactcagcagcagcccccaccagctaaaagggagaagaagactatacgcattcgcgatcctaatcaaggcggaaaagacatcactgaagaaatcatgtcaggcggaggcagtagaaatccaacgcccccaatcggtaggccgactagtacccctacacctccccagcagttaccatcccaggtgcctgagcatagcccggtcgtgtatggaacggtggagagcgcacacttggcagcgagcacacccgtcaccgcagcttccgatcagaagcaagaagaaaagcctaaaccagatcccgtcctgaagtccccatcacctgtgttacgactggtgcttagtggggagaagaaggaacaggagggccaaacctcagaaacaacagccattgtctctattgcagagctgccccttccaccatcgcctacaacagtgtccagcgtcgctcggtctaccatagctgcgccaacctccagcgccctaagctcacaacccatttttaccacagcaattgacgaccgatgcgagctgtcttccccacgggaggacaccatcccaattccatcactgacttcctgtaccgagactagtgatcctttgcccactaacgagaatgacgacgacatctgcaaaaagccttgttcagttgcccctaatgatatccctttggtgtcaagcactaacctcattaatgagatcaatggagtgtccgaaaaactgtcggccacagagtctatcgtggagatcgtgaaacaagaggtgctgcctctgacccttgaactggagatcctggaaaatcccccagaggaaatgaaactagaatgtatacctgcaccaattactccctccaccgtgccctcattccctccaactccccctactccgccagcgtccccacctcatacccctgtgattgtgcctgccgcagccactaccgtaagcagtccatcagccgctatcaccgtccagagagtcttggaagaggacgaatccattcgtacctgcttgagtgaggacgcaaaagaaatacagaataagattgaagttgaggccgacggacagactgaggaaatcctggactctcagaatctcaactctagacgctcccctgtccccgagacatccaacgagtgttag

SEQ ID NO: 31314 - DNA, 204 bp, synthetic construct
  source 1..204: mol_type = other DNA; note = Synthetic coding sequence
atggcccttctcgcagaacacctacttaagcctctccccgctgataagcaaatagagaccggaccttttctggaggctgtcagccacctgcctccgtttttcgactgtctgggatctcccgtcttcaccccaattaaggctgacatttccggaaatatcactatgagaaagctacgactgcgcggtgtcgaggggctggcttag

SEQ ID NO: 31315 - DNA, 2418 bp, synthetic construct
  source 1..2418: mol_type = other DNA; note = Synthetic coding sequence
atgatgcagaatgtccacctggccccagagacagacgaggacgatctgtactccggttataacgattataatcctatctacgacattgaggaactcgaaaatgacgcagccttccagcaagccgtgaggacaagccatggaagacggcctccttcgaagacatccttggcaagcagtatcggcaggccaatgacaggcgctattcaggacggagtcaccaggccaatgaccgccgtccgcgcagccggtttcactaaggccgctcttcgaggctctgcttttgacccgttgagtcagagcaggggtccggctagcccgttggaggctaagaagaaagattcccctgaggagaagatcaaacagctggagaaggaagtcaacgaactcgtggaggaatcttgcatagccaactcatgcggagacttaaaactcgctctcgagaaggccaaggatgccggaaggaaagagagagttctggtgcgacagagagaacaggtaacaacaccagaaaatattaatctggacctgacatacagcgttctcttcaacctggcttctcagtactccgtcaatgagatgtacgctgaggcactgaatacatatcaggtgatcgtaaagaacaagatgttctcaaacgcgggtattctaaaaatgaatatggggaacatctatctgaaacaacgcaattattccaaggcaatcaaattctatcgcatggcgttggatcaagtgccctccgtgaataaacaaatgcgcattaagatcatgcagaacattggcgttacatttattcaggccggtcagtatagtgatgcaatcaacagttacgagcacatcatgagtatggctccaaatcttaaggccggttacaaccttacaatctgttacttcgctatcggagaccgcgagaagatgaagaaagcattccaaaagctcattacagtgcccctggaaatcgatgaggacaaatatatctcgccctctgatgacccacacacaaacctcgtgacagaggctatcaaaaacgaccacttacgtcaaatggaaagagagagaaaagcgatggcagagaaatacattatgactagcgccaaactcattgcccctgttattgagacctcatttgccgctggttacgactggtgtgttgaggtagtgaaggccagtcagtacgtggaactagccaacgatctggagataaacaaggctgtgacctacctgaggcaaaaggattacaatcaggctgtagaaatcctcaaggtgctagaaaagaaagacagccgggtcaagtccgcggcagcaacaaatctgtcagccctgtattacatggggaaggattttgctcaggccagctcatatgctgacatcgcagtgaactcagatcgttacaaccccgcagcactcactaacaaggggaacactgtgtttgctaacggcgattatgagaaagctgccgaattttataaggaggccttgagaaatgacagctcctgcacggaggccctatacaatataggtcttacatatgaaaaactcaaccggttggacgaggctctcgattgcttcctcaagctgcacgctattctgagaaactccgcagaagtcttgtaccagatcgcaaatatctatgagctaatggaaaacccctctcaggcaatcgaatggctcatgcaagtcgtgagcgtgatacctaccgatccacaggttttgtctaagctgggtgagctctacgacagagaaggggataagagccaggccttccagtactattacgagagctatagatacttcccctgcaacattgaggttatcgagtggctaggcgcttattacatcgacacacagttctgggaaaaggccatccaatattttgagcgagcctccttgatccaaccaacgcaggtgaagtggcagctaatggtcgcttcttgcttccgccgtagtggcaattatcagaaagcactggatacttataaggacacccataggaaatttcccgagaacgttgagtgcctgagatttcttgtgcgcctatgcacagatcttgggctcaaagacgcacaggagtacgccagaaaacttaagaggctggagaaaatgaaagaaattagagagcaacgaataaaatccggaagggacgggtcaggcggatcccgtggcaaaagagaaggttcggccagcggtgattctgggcagaattattctgccagttcaaaaggagagaggctctctgctagattgcgtgctctgccgggaacgaacgagccctatgagtcgagcagcaataaagagattgatgcctcatacgtggaccctctgggaccacagatcgagagacccaaaactgctgctaagaagcgtatcgatgaggacgattttgccgatgaggaactgggagatgacctgctgccagaatag

SEQ ID NO: 31316 - DNA, 765 bp, synthetic construct
  source 1..765: mol_type = other DNA; note = Synthetic coding sequence
atggcaccaggatcattcgcagagtatacggtggtgcccgctagcattgccactcccgtgccaagcgtgaagcccgagtatttgactctcctggtgtccggcaccacggcctacatatccctaaaagagctgggcggattgtcggagggcaagaaagtactggtcaccgccgcagctgggggtaccgggcaatttgccatgcagctcagtaaaaaagctaaatgtcacgtaatcgggacttgcagcagtgatgaaaagagcgcgttcctgaagagccttggttgtgacagaccgattaattataagacagaaccagtgggtaccgtactaaaacaggagtacccagagggggtggatgtagtttacgagagcgtgggcggtgcaatgttcgatctagcggtggatgctttggctacaaagggaaggcttatagtcattggattcatttctggatatcagacccccacgggtctctcccctgtgaaggccggtacgcttccagcaaagttgctcaagaaatcggcatccgtgcagggcttcttcctgaaccactatttatcgaaatatcaggccgcaatgtctcacctcctggagatgtgtgttagcggagatctcgtgtgtgaagttgacttaggcgatctgtcccctgagggtcgctttaccggactggaatccattttccgggctgttaactatatgtacatgggaaagaataccgggaagatcgtagtagagctgccccacagtgttaattccaaactctag

SEQ ID NO: 31317 - DNA, 1212 bp, synthetic construct
  source 1..1212: mol_type = other DNA; note = Synthetic coding sequence
atgcatcaccccattcaaatgaagcctgccgattctgagaagagtaacgccgtagaggacagaaagctgtttatcggcatggtatctaagaaatgcaacgagaacgacattagagttatgttctcaccgtttggtcaaatcgaagagtgccgaatccttcggggtcctgatgggttgagccgcggatgtgcttttgttacattttccacacgggcaatggcgcaaaacgcaattaaagctatgcatcagtcacagacaatggaaggctgttcgtcccctatagtagtgaaattcgcagatacacaaaaagacaaggaacagcgcaggctgcagcaacagctggcccaacagatgcagcagctgaacaccgccacctgggggaacctgaccggactgggcggattaacccctcagtacctcgcccttcttcagcaggccacgtcctcatccaatcttggagctttttcaggaatccagcagatggcaggaatgaacgctctgcagctgcagaacctggccaccttggctgctgccgcagctgctgcacagacgtccgccacatctactaacgcgaatcccttgtctacaaccagcagcgccctgggtgctctgacttcccccgtggctgcatctacacctaattccactgctggtgccgctatgaactctctgacttcattgggaacgctccaaggcctggcgggtgccaccgtgggtctgaacaatattaatgcgttagcagttgctcagatgctgtctgggatggctgcactaaacggcggtctgggggctacaggattgaccaacgggaccgcgggaacgatggatgccctcacacaggcctactctggcatccagcagtacgcagcagctgctttgcccaccctctattcccagagtctccttcagcaacagtcagctgcaggcagccaaaaagaaggcccagaaggcgcaaatcttttcatctatcatctgccccaggagtttggtgatcaagacatcttacaaatgttcatgccctttggaaatgtgatctccgccaaagttttcatcgacaagcagacaaacctctctaagtgcttcggtttcgtgtcctacgacaatcccgttagtgctcaggcagccatccaagccatgaatgggtttcagattggtatgaagcgcctcaaagtccaactcaaacggagcaagaacgattccaagccgtactag

SEQ ID NO: 31318 - DNA, 1332 bp, synthetic construct
  source 1..1332: mol_type = other DNA; note = Synthetic coding sequence
atggccgaattcctgaaacaggtgaaaccgtacgttgaagaaggactgcacccacagatcattattcgggcatttcggacggccacccagctagctgtgaataaaataaaggagattgcagtgaccgtgaagaaggccgacaaagtcgagcagcgcaaattgctcgagaaatgtgccatgaccgcgctcagttctaaacttatctcgcagcagaaggctttcttcgctaagatggttgtggacgcagtgatgatgctggacgatctattgcagctgaagatgatcggaatcaagaaagtccaaggcggtgccctcgaggattcacagcttgtagcgggtgttgcctttaaaaagactttttcatacgcagggttcgagatgcagcccaagaagtaccacaaccccaaaattgccctgcttaacgtagaactggaactgaaggcagagaaagataacgccgagattcgggtccatacggtcgaagactatcaagcaattgtggacgccgagtggaacattttgtacgataagctggagaagatacatcacagcggagctaaggtagtgttatccaagctgccaattggagacgtcgcaacacaatattttgctgaccgcgacatgttttgcgcgggtcgagttcctgaagaggatttgaaaaggacaatgatggcctgcggcggtagcattcagactagcgtcaatgctctgtcagccgatgtgctgggtcgctgtcaggtgttcgaagagactcagatcggcggagaaagatataattttttcacagggtgccctaaggctaagacatgcacatttatcctccgaggaggcgctgagcagttcatggaagagaccgaacggtccttacacgacgccattatgattgttcggagggcgatcaagaacgatagtgtcgtcgcaggcggtggagccatcgagatggagctgtcgaaatacctgcgcgactactctcggacgattccgggaaaacagcaactactcatcggtgcctacgccaaggccttggaaataatccctcgccagttgtgcgacaacgcaggctttgatgcaactaacattttgaacaaattaagggcccgacacgcgcagggcggtacgtggtacggcgtggacatcaacaacgaagatatcgcagacaatttcgaggcgttcgtgtgggagcccgctatggtgcggatcaacgccctaacagctgcatctgaagctgcctgtctgatcgtatctgttgatgagactattaaaaaccctcggtcaactgtggatgcaccaaccgctgctggcagggggcgaggcaggggtcggcctcattag

SEQ ID NO: 31319 - DNA, 2193 bp, synthetic construct
  source 1..2193: mol_type = other DNA; note = Synthetic coding sequence
atgcagctcttcgagcagccttgtcctggcgaggatcccagacccggagggcaaatcggcgaagtcgagttgagtagctacacacccccagcaggcgtccctggcaaacccgcagcaccacattttctgcccgtgctgtgtagcgtatcgcccagtggctctcgtgtccctcacgacctcctcggaggaagcggaggcttcactctggaagacgcgctcttcggattactgtttggagcagacgccactctgttgcaaagccctgtcgtgctgtgtggactgcctgacggccaattgtgctgcgtgatactaaaagccttggtgacttccaggtctgctccaggcgatcccaacgccttggtgaagattctgcaccatcttgaagagcccgtcatttttataggtgcactcaaaacagagccacaagcagctgaggccgctgagaatttcctgcccgatgaagacgtccattgtgattgtctggtagcttttggacaccatgggcgtatgctggcaatcaaggccagttgggatgagagtgggaaactagtgccagagcttcgagagtactgtttgcctggcccagttctttgcgcggcatgcggaggagggggtcgtgtttaccattccacacccagcgacttgtgcgtggtggaccttagtagagggagtacacccctcgggcctgaacagcccgaggaggggcctgggggactgcccccaatgctatgtccggcttccctgaacatatgttccgtggtgagcctgtctgcgtcccccagaacccacgaaggtggcacaaagttgctggcactttccgccaagggacgactgatgacttgctctctggatcttgactctgagatgcccggtccggctcggatgactacagaaagtgctggccaaaagatcaaggaactgctgagcggaattggcaacatctcagaaagagtgtcctttctgaaaaaagccgtcgaccaaagaaataaagccttgacctctctgaacgaggctatgaatgtgagttgcgccctgctgtcgtcaggaaccggccctcggccaatatcatgtacaacgtccacaacctggtcacgcctgcagacacaggacgttctgatggcaacatgtgtgttggaaaactctagctcattcagccttgatcagggctggactctctgcattcaggtgttgacttcaagctgtgccctcgatctcgactccgcgtgcagtgccataacttatactatccctgtggatcagctgggaccgggtgctagacgcgaggtgacactgcctctgggtccaggcgagaacgggggtctggaccttcctgtgactgtgtcatgcaccctcttctatagcctccgtgaagtagtcggcggtgccctcgccccatccgactccgaggatccattccttgatgaatgcccgtcagacgtattacccgagcaggaaggtgtgtgtttacccctgtcacgccataccgttgatatgctccagtgcctgagattcccagggttggccccaccccatacacgtgcacctagcccactgggtcctacacgggacccggtcgcaacattcctcgagacctgccgcgaacccggatcacagcccgcaggacctgcctcgcttcgagctgagtatctgcccccatctgtcgcaagcatcaaggtgtcagctgaactccttcgcgcagctctgaaagatggtcattcgggcgtaccactgtgttgcgccacactacagtggttactggcagaaaatgccgcagtggacgtcgtgagagcacgtgcactgagctctatacagggggtggctcccgacggggcaaacgttcacctgattgttcgggaagtggccatgaccgacctgtgtcccgctggtcctattcaagctgtggagatccaagtggagtcctcctctctggctgacatctgccgcgctcaccacgcggtcgttggccgtatgcagaccatggtcaccgagcaagccacacagggatccagcgccccagaccttagggtccagtacctgagacagatacacgcaaaccatgagacattactacgagaagtccagactcttagggatcgactttgcactgaagacgaagcttcttcatgcgcaactgcacagcgcctgctccaggtatacaggcagctgcggcatccctctctcattttgctttag

SEQ ID NO: 31320 - DNA, 4179 bp, synthetic construct
  source 1..4179: mol_type = other DNA; note = Synthetic coding sequence
atgtcgatgctaaaacccagcggattaaaggcccctaccaaaatcctgaaacctggtagcacagcactgaaaactccaacagccgtggtcgctccagtcgagaagacaattagcagtgagaaggcttccagcacaccctcttccgagacccaggaggagtttgtggatgatttccgcgtcggagagcgagtatgggtgaacggcaataaaccgggatttatccaattcctgggggaaactcagttcgctcccggtcagtgggccggtattgtgctcgacgagccaatcggcaaaaacgatggatccgtcgccggagtgcggtacttccagtgtgagcccctgaaggggattttcacgcgaccctctaaactcactagaaaggtccaagccgaagatgaggcaaacggccttcagacaacgccagccagtcgcgctacctcacctttgtgcacttcaactgcttccatggtgtccagttcacccagcaccccatctaacatacctcagaaaccctcacagcctgccgctaaagagccttcagcaactccaccaatcagtaatctaaccaagacagcctcagaaagcatatccaacctcagcgaagccggtagtataaagaaaggcgagcgcgagctgaaaatcggagacagagtattggtggggggtacaaaggcaggcgtcgttcggttcctgggggagaccgactttgctaagggggagtggtgtggagtagagctggatgagcccttaggtaaaaacgatggcgcagttgcaggaacccgttactttcagtgccagccaaagtacgggctgtttgctcccgtgcacaaagtgactaagatagggttccccagtacgaccccagcaaaagcaaaagctaacgccgtgaggagagtgatggctaccacaagcgcatcgttgaaaaggtcaccaagtgcttcttcactttcctctatgagcagcgtggcgtctagcgtctcaagcagaccctctcggacaggactgctgacggaaacttcgtcccgctacgctagaaaaatttccggcaccacagctttacaagaggccttgaaagaaaagcaacagcatatcgaacagttgttagcggaaagagatctggaaagagccgaagtggctaaggcaacaagccacgttggcgagatcgagcaggagctggcactggccagagatggccatgaccagcatgtgctggagcttgaggccaagatggaccagctgcggaccatggttgaagcagcggatcgcgaaaaagtggagttgttaaaccagcttgaagaagagaagcgcaaggtggaggatctgcagtttcgggtggaggaggaatccataacgaagggagatctcgaagtcgccacggtgtctgaaaagagtaggattatggagctggaaaaagatctggcattgagggtccaagaagtcgcggagcttaggcgccgactggagagcaataagccagcaggggacgtggacatgtcgctgagcctgctccaggaaatcagctcccttcaggagaaattggaggtgacccgcactgaccatcaacgggagattactagtctgaaagaacacttcggggcacgggaagaaacccaccagaaggagattaaggctctatatacggccactgaaaaactctcgaaggaaaacgagagtcttaagtccaagcttgaacatgctaataaggaaaacagcgatgttatcgcactgtggaagagtaaactggaaactgctatcgcctcccatcagcaggccatggaggagctgaaggtgagcttttcaaaaggcctcgggacagaaacagctgaattcgctgaattaaaaacccagattgagaagatgaggcttgactatcagcacgaaatcgagaaccttcagaaccagcaagactctgaacgagccgctcatgccaaagaaatggaggctcttcgtgcaaaacttatgaaagtcattaaagagaaggaaaactccctggaagccatccggtccaaattagataaggctgaggaccaacacctggttgagatggaagatactcttaacaaattgcaggaagctgagattaaggtcaaagaacttgaagttttacaagcgaaatgcaacgagcaaacaaaggtgatagacaactttacctcacaactgaaggctaccgaggaaaagcttttggacttggatgcgttgagaaaagcatcctctgaaggcaagtcagagatgaaaaagctgaggcaacagttagaagctgccgagaagcagattaaacacttagagattgagaagaacgctgaatccagtaaggcaagtagtatcacgcgtgagctccagggcagggagttaaagctgactaatttacaggaaaatttaagcgaggtgtcccaggtgaaagagacactcgagaaagagctgcaaatcctgaaggaaaagttcgccgaggcatctgaggaggctgtgtctgttcaaaggagcatgcaggagacagtcaacaagctccatcagaaggaggaacagttcaacatgctctcgagcgaccttgagaagctccgcgaaaacctcgccgacatggaggctaaattcagagagaaggacgagagggaggagcagctaatcaaagctaaggagaaattggaaaatgacatcgcagagataatgaagatgagcggcgacaattcgagccagttgacaaaaatgaacgacgaactaaggttgaaggaaagggacgttgaagagctgcagctgaagctcactaaggccaatgagaatgcctctttcctgcagaaatctattgaagacatgaccgtgaaagccgaacaatcccagcaggaagccgctaagaagcacgaggaggaaaagaaggaacttgaaagaaaactttcagatctcgaaaagaaaatggagaccagtcataatcagtgccaagagctcaaggccaggtacgaacgtgcaactagtgaaactaagaccaaacacgaggaaattctacaaaacctgcaaaagaccctcctcgacacagaagacaagctcaagggcgctcgggaggagaactccggtctgttgcaggaattggaggaactccgcaagcaggctgacaaagccaaggcagctcagactgccgaagatgccatgcagatcatggagcagatgacgaaagagaagaccgagacattggctagcctggaagacaccaaacagaccaatgcaaaactgcagaacgagctggatacactcaaggagaataacctcaagaatgtggaagagcttaacaagtctaaggagctgttgaccgtggaaaaccaaaagatggaggagttccgaaaggaaatcgagactttgaagcaggccgctgctcaaaaatcccagcagctgagcgccttgcaggaggagaacgtaaaactggcggaggagctggggaggagtcgtgacgaggtcaccagccatcaaaagctcgaggaagaaaggtccgttctgaataaccagctactggaaatgaagaagcgtgagagtaaatttatcaaggatgccgacgaagagaaagctagtttacagaagtccatttccatcacttcagccttgctgactgaaaaagatgccgagcttgagaaactgaggaacgaggtgacagttcttcgcggtgaaaacgcttctgccaagagcctgcattcggtggtccaaactttagagtcggacaaagtgaaactggaactgaaggtgaaaaacctggaactgcagctgaaagaaaataaaagacagctcagttcgtccagtggaaataccgacacccaggcagacgaagacgagcgcgcacaggagtcccaaatcgattttttaaacagtgtgattgtcgatttgcagcggaagaaccaggacctgaagatgaaggtagagatgatgtctgaagctgcactgaacggaaatggtgacgatctgaacaactacgacagcgacgaccaagaaaaacaatcgaagaagaagccacgtcttttctgcgacatctgcgactgttttgacttgcatgacaccgaggactgccctacccaagcccaaatgtccgaagatccgcctcatagtactcaccacgggtctaggggcgaggagaggccgtattgtgagatctgcgaaatgttcgggcattgggcgaccaactgtaacgacgacgagacattttag

SEQ ID NO: 31321 - DNA, 492 bp, synthetic construct
  source 1..492: mol_type = other DNA; note = Synthetic coding sequence
atgttccgtaaaatcggaattgaagccttaaagcaagttaccaagagatatgcccgtaaacaaaatcggtgggtgaagaatagatttctgagtcgcccaggccctatcgtaccgccagtatacggactagaagtgtctgacgtgagcaaatgggaagagagtgtcctcgaacccgcactggagatagtccaaagtttcattcaaggccacaaaccaaccgcaactcctataaaaatgccatacaatgaagctgaaaataagcgctcttatcacttgtgtgatctgtgtgaccgcattattatcggcgatcgggaatgggcagcccatattaagagtaagtcgcacctgaaccagctaaaaaaaaggcgaagacttgattctgacgctgtgaacacgatagagtctcagtccgtatcaccggatcataataaagaaccaaaggagaaagggagcccgggacagaatgatcaggaactgaaatgctctgtatag

SEQ ID NO: 31322 - DNA, 1602 bp, synthetic construct
  source 1..1602: mol_type = other DNA; note = Synthetic coding sequence
atggcctcaccaggcaaggataattacaggatgaagtcatataagaataatgctcttaacccagaagagatgaggcggagacgcgaagaggaaggaattcagcttcggaaacagaaacgcgaacagcagctcttcaagcgaagaaacgtggagctcattaacgaggaagccgctatgtttgactcacttcttatggactcctacgtctcctctaccactggagagagcgtcatcacacgtgaaatggtcgagatgctctttagcgatgatagcgatctgcagctcgctactacccaaaaatttcgtaagctactgtccaaggagcctagtcctcctatcgacgaagtgattaacaccccacgggtggtcgatcgctttgtcgaatttctaaaacgaaatgagaactgtacattacagttcgaagctgcttgggcattgactaacatagcaagtgggacttcacagcagactaagatcgtcatcgaagccggagccgtgccgatcttcatcgagctcctgaattccgatttcgaggatgtgcaagagcaggccgtgtgggccctcgggaacattgctggagactcatcagtgtgtcgggactatgtcctcaactgtagcattctcaatcctcttttaacacttctgacgaaatccactagactcaccatgactcggaatgccgtttgggccctgtcgaatctttgtaggggaaagaatcccccacctgagtttgcaaaagttagtccttgtctaccagtgctctcgagacttctcttttcatcagatagcgacctcctcgcagacgcatgctgggctctgagctatctatccgacgggccaaacgaaaaaattcaggcagtgattgattctggtgtgtgccgccgattagtggagctgttgatgcataatgactataaggtggcctcacctgctctcagggccgtcggaaacattgtgaccggggatgacattcaaacccaggtgatcctgaactgtagcgcgctcccatgcctgctccacctacttagctcccccaaggaatcaatccgcaaggaggcgtgctggacaataagcaacattactgcaggaaatcgcgcacagatccaggccgtaatcgatgccaatatctttccagtgttaatcgagatccttcaaaaagccgagtttaggacacgcaaggaagccgcatgggcaataacaaacgctacaagtggaggaaccccggaacagatccggtacctagtgagcctcggatgcatcaagcctctctgcgacctgctcacagtaatggactccaagattgtgcaggtggctcttaacggattggagaatatcctgagactcggtgaacaggaaggcaaacggtctggaagcggtgtgaacccttactgcggccttatagaagaagcctacgggctcgataaaattgaatttttgcaaagtcatgagaaccaagagatatatcaaaaagccttcgacctcatcgaacattatttcggcgtcgaagacgatgactcttcattagcccctcaagtggatgaaacgcagcagcagtttatttttcagcagccagaagcacctatggagggcttccaactttag

SEQ ID NO: 31323 - DNA, 993 bp, synthetic construct
  source 1..993: mol_type = other DNA; note = Synthetic coding sequence
atggaacgcttcatggagcaggtcgtgttcaagtacctcagggctgagcccgaggatcactactttctgatgacagagccacccctaaacacccccgaaaacagagagtatctggcggagataatgtttgaatctttcaacgtgccgggactatatattgcggttcaggccgttctggccctcgctgccagttggactagtagacaggttggagaacgcacattgaccggtattgtaatcgattctggtgatggagtgacccacgttatccctgtagcagagggttacgtgattggctcatgtattaagcatatccccatcgcgggtagggatattacctatttcatccagcagttacttagagaaagagaagtaggtatccccccagaacagtccctcgaaactgccaaggcaatcaaggaaaagtactgctatatctgccccgatatagtgaaggagtttgctaagtacgatgtggatccaaggaagtggattaagcaatacactgggataaacgccattaaccaaaaaaaattcgtgatcgacgttgggtatgaaaggttcctcggccctgaaatatttttccatcctgaattcgcaaaccctgattttatggaatctatttcggatgttgtggatgaagttatacaaaactgtcccattgacgtgcggagacccctctacaaaaacgtcgtgctgagcggaggttcaaccatgtttcgggactttggtagacgcctccaacgcgacttgaagagggttgtggatgcccgtctgagactttccgaagaactctctggaggcagaataaagccaaagcccgttgaagttcaggtggttacccatcatatgcagcgatacgcagtgtggttcgggggatcgatgttggcctccacccctgagtttttccaagtgtgccatactaaaaaggattatgaggagtatggcccaagcatttgccggcataatcctgtgtttggtgtcatgtcatag

SEQ ID NO: 31324 - DNA, 576 bp, synthetic construct
  source 1..576: mol_type = other DNA; note = Synthetic coding sequence
atgtcgcgggagagggggagccgctccgaggagcctggggcaggaaatagagagtctgggtcacgcgaaccaggcctggccgcagctgccatgtctactgtggatctagcaagagtcggtgcatgtatcctcaaacacgcagtcacgggcgaagccgtggaactcagaagtctgtggcgtgaacatgcttgcgtggtggccggactgagaagatttggctgcgtggtgtgtagatggatagcacaggacctgtccagcctcgccggtcttctcgatcagcacggcgtgagactggtgggggtgggccctgaagccttggggctgcaagaattcctcgacggagactattttgctggcgagctgtacctcgatgaatccaaacaactctacaaggagttaggcttcaaacgatataatagtctgagcatcctgcccgcagcccttggtaagcctgtcagagacgttgcagccaaaagcccaggcgactatgtgcccaaggaacatatccttcaagtactgggcataagcgccgaagtttgtgcttcagaccctccccagtgtgaccgtgaggtatag

SEQ ID NO: 31325 - DNA, 1050 bp, synthetic construct
  source 1..1050: mol_type = other DNA; note = Synthetic coding sequence
aatacgatccatgacgtgctcgacgtcgaagccgcagtcgttaacctggacaatagtgtcgtggacctggagaccctgcaggccctgtatgagaacagagcgcagtccgacgagctagaaaaaattgagaagcacggccgatcttctaaagataaggagaacgccaaatccctcgacaaacccgagcaattcttgtacgaactgtcgttgattcccaattttagcgagagggtcttttgtattctgtttcagagtactttctcagagtccatttgtagtattaggcgcaaactggaattgttgcagaagctttgcgagactctgaaaaatgggccaggagtgatgcaggttctggggctggttctggcattcggcaactacatgaacgggggaaataagacccgcggacaagctgacggattcggcctcgatatactcccaaagcttaaagatgtgaagtcctctgacaatagtagatccctgcttagctacatcgtctcttactatttacggaatttcgacgaagatgcaggaaaggagcagtgcctgtttcctctcccagagcctcaggacctgtttcaggcttcgcagatgaaattcgaggattttcaaaaggacttaaggaaattaaagaaggacctgaaggcttgtgaagtagaagccggaaaagtgtaccaggtgtcttccaaagagcacatgcaaccgttcaaagagaacatggaacagttcatcattcaggctaaaattgatcaagaggccgaagagaacagcctgacagagacccacaagtgttttttagagacaaccgcttactttttcatgaaaccaaagctaggagagaaagaagtctctccaaatgcctttttttcaatttggcacgaattctcctccgacttcaaagacttctggaagaaggagaacaaactgctcttacaggagagagtgaaggaagcggaagaggtttgcaggcagaaaaaagggaaatccctttataagattaaaccccgtcacgactctggcatcaagaacaataattcgatgcacacctag

SEQ ID NO: 31326 - DNA, 570 bp, synthetic construct
  source 1..570: mol_type = other DNA; note = Synthetic coding sequence
atgactgcttccgcatcttcattcagcagtagccaaggagtgcagcagcccagcatttacagcttcagccagatcacccgcagtttattcctttcaaacggagtagcagcaaacgacaaactcctcctatcctccaatagaattactgctatcgtgaacgccagcgtggaagggcagaggattctgcggggtatacagtatattaaggtcccagtgaccgatgcaagggattcacgcctatacgatttctttgatcccattgccgatctcatccacaccatcgatatgcgccaggggagaacgttgctgcactgtatggctggcgtaagccgtagcgcatcgctgtgtttggcttatctgatgaagtaccacagtatgtccctgctggacgcccacacatggacaaagagcaggagaccaatcatcagaccaaataatggattttgggagcagctgatcaactacgaatttaagctcttcaacaacaatacggtgcggatgattaactcaccagttggcaacattcctgatatctacgagaaggatctcagaatgatgatttctatgtag

SEQ ID NO: 31327 - DNA, 549 bp, synthetic construct
  source 1..549: mol_type = other DNA; note = Synthetic coding sequence
atgagtggcaggtcagtgcctcacgcacatcctgccacggccgaatacgagtttgctaacccttcgcgattaggggagcagcggttcggtgaaggattactgccagaggaaattcttactcccaccctttaccatgggtattatgtgcggcctcgagcagccccagcgggagaggggagccgcgctggagccagtgaacttcggctgtctgagggaaagttccaagccttcctagacgtgtcacatttcaccccagatgaagtgactgtgcggacagtagataaccttttggaggtttccgccagacatccgcaacggctcgaccgccacggattcgtcagtcgggagttctgtcgaacctatgtcctccccgcagatgtggacccatggagagtgcgggcagctctgtctcacgatggtattctcaacttagaggctccacgcggaggtcgccacctggataccgaagtgaatgaggtgtacatatcattattgcctgcccctcccgatcctgaggaagaggaggaagccgctatcgttgaaccttag

SEQ ID NO: 31328 - DNA, 387 bp, synthetic construct
  source 1..387: mol_type = other DNA; note = Synthetic coding sequence
atggtgttccgcaggttcgtggaggtagggcgagtggcctatgtttccttcggccctcacgccggaaagctagtggctattgttgatgtgattgatcagaaccgcgcattggtggacgggccatgtacacaggtcagaaggcaggctatgccatttaaatgcatgcaattaaccgactttattctgaagttcccacattccgcacatcagaaatacgtgcgacaagcctggcaaaaggctgacataaacaccaaatgggcagccactaggtgggctaagaagattgaagcccgtgaacgcaaggcgaaaatgactgatttcgatcgcttcaaggtgatgaaggcaaagaagatgcgcaaccgcattatcaagaacgatacgaggtag

SEQ ID NO: 31329 - DNA, 492 bp, synthetic construct
  source 1..492: mol_type = other DNA; note = Synthetic coding sequence
atgttccgtaagatcggtatcgaagccctgaagcaggtgactaagaggtacgctcgcaagcagaatcggtgggttaaaaatcggtttctgagccgccctggtcccattgtcccgccagtctatggacttgaagtgtccgacgtctcgaagtgggaggaatccgtccttgagccggcactggaaatcgtgcagtcctttatccagggtcacaagccgaccgcaacacccataaaaatgccatacaatgaagcggagaacaagagaagttaccacctgtgcgacttatgcgatcgcattatcatcggcgatagagagtgggcagcccacataaagagcaagtcccatcttaaccagctgaagaaacgaaggagactcgattcggacgcggtgaacaccatcgagagccagtctgtgagccctgaccacaacaaagagcccaaggagaagggctcaccaggccaaaatgaccaggagttgaaatgctccgtctag

SEQ ID NO: 31330 - DNA, 1224 bp, synthetic construct
  source 1..1224: mol_type = other DNA; note = Synthetic coding sequence
atggctgcagagctctacgctcctgcctctgccgcagcggcagatctcgcgaacagcaacgcaggcgctgctgttgggcgaaaggccggtccccgatccccaccatccgctcccgcaccagcacccccaccgcctgccccagcccctccaactcttggtaataaccaccaggagtcccctgggtggagatgttgccggccaactttgagggaaaggaatgctcttatgttcaataacgaactgatggctgacgtccattttgtggtggggcctcctggtgcgacacgcactgtgcctgcacacaaatatgttctcgcggtgggcagttccgtcttctatgccatgttttacggagaccttgcagaggtcaagagcgagatccacatcccagatgtggaacccgctgccttcctgattctcctcaaatacatgtatagcgacgagattgatctagaagccgataccgtcctcgccacgctctatgcagcaaaaaagtatattgtccccgctctcgcgaaagcttgcgtgaacttcctggagacaagcctggaggcaaaaaatgcctgcgtgctgctatctcagtcaaggctatttgaggaacctgagttaacccaacgctgttgggaggtaatcgatgctcaagccgaaatggctttaaggtctgaaggattttgtgagattgatcgccagacgctggagattatcgtgacgcgcgaagccctaaacacaaaggaggcagtcgtgttcgaggcagtcctgaactgggcagaagcagaatgcaaacggcagggcctgcctattacacccagaaataagcggcatgtgctgggcagagccctctacctggtacggattcccacaatgacgcttgaagaatttgccaatggtgccgcacagtctgatatactgaccctggaagagacacattcaattttcctgtggtatacggcgacaaataaaccgagactggatttccctctaactaagaggaagggcctggcccctcagaggtgccatcggttccagtccagtgcctatcgctctaatcaatggcggtatcggggtagatgcgattccatccaatttgcggtggaccggagagtcttcattgccggtctggggctttatggtagttctagtggaaaagctgaatattccgtaaaaattgagctcaagaggcttggcgtcgtgctggctcagaatctgactaaatttatgtcctag

SEQ ID NO: 31331 - DNA, 603 bp, synthetic construct
  source 1..603: mol_type = other DNA; note = Synthetic coding sequence
atgctcgagctggtggcacaaaagcagcgcgagcgtgaagagcgtgaagaaagggaggcgttagagcgcgaacgacagcgtagaagacaaggccaggagctgtcagccgctcgacagcgtttacaagaggatgaaatgagacgggctgcagaggagcgtcggcgtgagaaagctgaggaactcgcagcaaggcagcgagtaagggaaaagattgaaagggacaaggcggagcgcgctaaaaaatacgggggatcggttggttcccaaccgcctcccgtggctccggagcctggcccagtgccttcttctccctctcaggagccccctaccaagcgcgaatatgatcagtgcagaatccaggtgcgactgcccgacggaacatccctaactcagacctttcgtgccagggagcagctggccgcagtgcgattgtatgttgagctacatagaggggaggagctagggggaggacaggatccagtgcagttgttatcagggtttccacggagagcattcagtgaggctgacatggaacggcctttacaggagctcgggctggtgccctctgctgtcctgatcgtggccaaaaaatgcccctcctag

SEQ ID NO: 31332 - DNA, 885 bp, synthetic construct
  source 1..885: mol_type = other DNA; note = Synthetic coding sequence
atgggcctggccagttggagtcagctggctagtactccaagagccccaggatcccgagatgctcgatgggagaggcgcgagccagccctccgcggagcaaaggacagactgacaatcggcaagcacctagacatgggtagccctcagctgcggacgcgcgaccgtggatggccttccccacgacccgagagagagaagcggacctcacagtccgcacgccgtccaacttgcactgaatctcgttggaagtcggaggaggaggtggaatccgacgatgagtatctggcccttccagctaggctcacacaagtcagtagcttggtctcttacttgggctcgatctctaccctggtcacattgccaactggggatatcaagggccagtcacccctggaagtatctgacagtgacggaccagcgagctttccatcctcaagtagccagtcacagctgcctcctggagccgctctgcaggggtccggggaccccgagggccagaatccttgtttcctaagatctttcgtcagggcacatgactctgcaggggaaggctcgctcggttcaagccaggctctgggggtttcatcgggcctgctaaagaccagaccaagcctgccagctagactcgaccgatggcccttttccgaccctgacgtcgagggccagttgccacggaagggaggagagcagggcaaagagtcacttgtgcaatgtgtgaaggtcatgaccctgaacgtccgcaagctctgtgttcaagtaagttgtctattcccacagtccaccaatatcattattaaacacgttcatgttgaccaggccctgttcatgtgccaagcgctgtgttgcacactaagttactctgtgttaacaaccttcaccagatag

SEQ ID NO: 31333 - DNA, 354 bp, synthetic construct
  source 1..354: mol_type = other DNA; note = Synthetic coding sequence
atggtcagaaaaattactctcgtgagcgctgccccaggaaaggttatctgcgagatgaaggtggaggaagagcacactaacgccatcggtactcttcatggaggactgaccgcaacgctcgtggacaatatctcaacaatggcgctgctgtgcacggagcgtggggcacctggagtcagcgtcgacatgaacatcacttatatgtcccctgcaaagctcggagaggacattgtaattaccgcacatgtcctgaagcaggggaagacactagccttcactagtgtcgacttgacaaacaaggccactggaaagctgatcgctcagggccgacacactaagcacctgggtaactag

SEQ ID NO: 31334 - DNA, 840 bp, synthetic construct
  source 1..840: mol_type = other DNA; note = Synthetic coding sequence
atgacatctgggaaaatcaagaagttcattcaagagaatatttttggcatctgtccacacatgaccgaggacaacaaggatctgatacagggcaaggacctcctgattgcctattacgacgtagactacgaaaaaaatgccaaagggagtaactattggcgcaatcgtgtcatgatggtcgccaaaaagttcctagacgcagggcataaactgaactttgctgtggcttcacggaagacgttcagccatgaactgagtgatttcggtctcgagtccacggcgggtgagatccccgttgtggccatacgcaccgccaaaggagagaagttcgttatgcaggaggagttctccagagacgggaaagcacttgagaggttcttacaggactactttgatggtaatctcaaaagatacctcaaatcggagcccattcctgagtccaacgacggacctgttaaggttgtggtagccgagaatttcgatgagatagtgaacaacgaaaataaggacgtgctcatcgaattttatgctccctggtgcggtcattgtaaaaatcttgaaccaaaatataaggagttaggcgaaaagttgtctaaagacccgaacatcgtcatagccaagatggacgcaacagcgaacgatgtcccctcgccatacgaagtaaggggatttccgactatctacttttctcctgctaacaaaaagctcaatcccaagaaatacgaaggcggtcgcgaactttcagactttatttcatacctgcagagagaggccacgaatcctccggtgatccaggaggaaaagccgaagaagaagaagaaagctcaagaggacctttag

SEQ ID NO: 31335 - DNA, 3228 bp, synthetic construct
  source 1..3228: mol_type = other DNA; note = Synthetic coding sequence
atgtcccaaggcttccatcccgagagagaccctagtgatctgaagaaggtcaaggccgtagaagagaacggcgaggaggcagagcccgttaggaacggcgcagaatcagtgtccgagggggagggaattgacgccaattctggttcgacagacagttctggcgatggggtcacatttccatttaaaccagagtcatggaaacccacagataccgaagggaagaaacagtacgatcgcgagttcctgctggacttccagtttatgcccgcttgtatccagaagccagagggattgccccctattagtgacgtggtcctggacaagatcaatcagcccaaactgcccatgagaacgctggatcctagaatccttccgagaggccctgatttcactccggcatttgctgactttggtcgacagacaccaggagggaggggggtacctatatgtaaggtgcaatctcgtcatggactgccgatcctagagcaatctaaggcgccaacctgtcccccacttgtgatgtcccaccccccaatgaaaagcctcccccttgggcttttgaacgtggggtctcgaaggtctcagcctgggcaacgtagggagcctcggaagattataacggttagcgtgaaagaggacgttcatctcaagaaagcagaaaatgcctggaaaccatcccagaagcgcgactcacaagcagacgaccccgagaatataaaaacccaggaacttttccgtaaagtcaggagtatcctgaataagctcaccccacagatgttcaaccagctgatgaagcaagtgtctggattgacggttgacactgaagagaggctcaaaggcgtcatcgatctggtttttgaaaaagccatagatgagccttctttctctgttgcctacgccaacatgtgccggtgtcttgtcaccctcaaagttcccatggcagataagcccggaaatacagtcaattttcggaaactgctgttgaaccggtgtcagaaagagttcgaaaaggacaaagcagatgacgatgtcttcgagaaaaagcaaaaggagcttgaagccgcttcggcccctgaagagcggactcgactgcatgatgagctggaagaggcaaaggacaaggctcggagacgaagtataggaaacatcaaattcatcggcgagctattcaagctgaagatgcttacagaagccattatgcatgactgcgtggtcaaactgctgaagaatcacgatgaggaatcacttgaatgcctgtgccgtctgctcactactataggtaaggacctggactttgagaaagctaaaccccgaatggatcagtacttcaaccaaatggaaaagatcgtcaaagagagaaagacatcatcccgaattcgattcatgctgcaggatgtaatcgatctcaggctgtgtaactgggtatcccggagggctgaccagggtcccaaaactatcgaacagattcacaaagaggccaagatcgaggaacaggaggagcagcgaaaagttcagcaactcatgacgaaggaaaaacggagacctggggtacagagagtggacgagggaggctggaacactgtccaaggtgcaaagaattcaagagtcctcgacccgtccaagttcctgaagatcactaaacctaccattgatgaaaagatccagctggtgcccaaggcgcagctaggctcttggggtaagggttcctccggtggcgcaaaagcctccgagacagatgccttacgctcctctgcctcgtccctcaaccggttctccgcgctgcagcctcccgcacctagcgggtccaccccgagcactcctgtcgagttcgattcccgtcggacacttacaagcaggggttctatggggagagaaaaaaacgataagccgctgcctagtgcaactgctcggccaaatactttcatgagaggcggatcaagtaaggatctcctggacaaccagtcccaggaagaacagcggagggagatgctggagactgtcaaacaactgaccggaggcgtggacgttgagcgcaattcaaccgaggccgagagaaataagaccagagagtcagccaaacccgaaatcagcgccatgagcgctcatgataaagctgccttgagcgaggaggaactggagaggaagagcaagtcgatcattgatgagtttctgcacataaatgacttcaaggaggcgatgcagtgtgtggaggagctcaacgctcagggtttactccacgtttttgttcgcgtcggggtggagtccaccctagaaagaagtcagatcaccagagatcacatgggccagctcctgtatcaactagtccagagcgaaaagctatccaaacaggattttttcaaggggttttcagagactttggaactggccgatgacatggcaattgacataccgcatatctggctgtacctcgcggagctggtcacgccaatgctgaaggaaggcggtatcagcatgagagagctgacaattgagttcagtaaacccttgcttccggttgggagagctggtgttctcctttctgagatccttcacctgctgtgtaagcagatgtctcataaaaaagtaggagccttgtggagggaagcagatctgtcatggaaagattttctcccagaaggggaggacgtgcataactttctcctggaacagaaactagattttatcgagtccgatagcccctgttcctcggaagccctttccaaaaaggaactgtccgcagaagagctctataagcgattagagaaattaattatcgaggataaggccaacgacgagcagatcttcgattgggtggaagcaaatctcgatgagatccagatgtccagtcctacattcctgagagctctgatgactgcggtgtgcaaagctgcaatcatcgccgactctagtaccttccgtgtggatacggcggtcatcaagcagcgcgtgcctattcttttgaagtatcttgatagtgacaccgaaaaagagctgcaggcgctctatgcccttcaggcctccattgtcaagttggatcaaccagccaaccttctccgaatgttcttcgactgcctgtacgacgaggaggtcatcagcgaagatgccttttacaagtgggagtctagtaaagatccggctgaacagaacgggaaaggtgtggctctgaagagcgtgacagccttttttacctggttgcgagaagccgaggaggagtccgaggacaactag

SEQ ID NO: 31336 - DNA, 474 bp, synthetic construct
  source 1..474: mol_type = other DNA; note = Synthetic coding sequence
atgaaatgcatcccttatagcgtgctcttaaaagatttagaaatgcgaaatttacgggagttggaagacttaataatcgaggctgtgtacacagacattatccagggcaagcttgaccagagaaatcagctcctcgaagtcgatttttgtatagggcgagatatccggaaaaaagatattaacaatatagtcaagaccttgcacgagtggtgcgacgggtgtgaggctgttctcctgggaatcgagcaacaggtgctacgagctaatcagtacaaggaaaatcataatagaacacagcaacaggtcgaagcggaggtgacaaacatcaagaagaccttgaaagccactgcctcatcctcggctcaggagatggagcagcagctcgcagagcgggagtgtccccctcatgccgagcagagacagcccacaaaaaaaatgtcgaaggtgaaaggtctggtttcttcccgccactag

SEQ ID NO: 31337 - DNA, 837 bp, synthetic construct
  source 1..837: mol_type = other DNA; note = Synthetic coding sequence
atggattgtagggagatggatctttatgaagattaccagagcccattcgactttgacgctggcgtgaacaagagctatctctacctgtcaccctctggcaattcttccccacccggttcccccactttgcaaaagtttggactgctgcgcactgatcccgtgccagaagaaggggaggatgtggctgcaaccatcagcgctaccgagaccctctccgaggaagagcaggaagaactcaggcgggagctggctaaagtggaggaagagattcaaacattgtctcaagtcctcgcagcgaaagagaagcacttggccgaaatcaaaaggaagctaggtatcaattcattgcaggagctgaagcagaacattgcaaaggggtggcaggatgtaaccgcaaccagtgcttataagaagactagcgagacgctcagccaggctgggcaaaaggctagcgcagctttctcctccgttggttccgtaattaccaagaaactagaggatgtgaaaaatagccccacctttaaaagtttcgaggaaaaggtagaaaatctgaagggctccccaaagaatgttgagtcctttgcgagtatgctgcgccattccccccttacccagatgggccctgcgaaggataagctggtgatcggccgaatcttccacatcgtagagaatgatttatatatagatttcgggggaaagtttcactgtgtctgtagacggccagaggttgacggcgaatccccaatctcttggtatgcagtgtggcgccgttttagtcaggtgatgattacgtgcttctccagcaatagtgacttcggcaaacacaggaaacgctag

SEQ ID NO: 31338 - DNA, 3123 bp, synthetic construct
  source 1..3123: mol_type = other DNA; note = Synthetic coding sequence
atggtgagcagcgcccaaatgggatttaatctgcaggctctactggagcagctcagccaggacgagttgagtaagttcaaatatcttataactactttttccttggcccatgaattgcagaaaataccacacaaggaggtggacaaagctgatggcaagcagctcgtggaaattctcaccacacactgtgactcatattgggtggagatggcaagtctgcaggtattcgagaaaatgcacagaatggatctgtccgaaagagctaaagatgaggtgcgcgaggccgcactgaagtcttttaataagcgcaagcccctctcactggggattactaggaaggaacgcccacctctggacgtggatgaaatgttggagagattcaaaacagaagcacaggataaggataataggtgtcgctacattctgaagactaaattccgtgagatgtggaaaagttggccaggcgattccaaggaggtgcaagtgatggccgagcgctacaaaatgctgatccccttctccaacccaagggttttacctgggcctttcagctacactgtggttctgtacggaccagcaggcctgggcaagactaccctcgcccaaaaactgatgctggattgggccgaggacaacctcattcacaaatttaaatacgccttttacctctcatgcagagaactgagcagactcgggccatgttctttcgccgagctggtattccgcgattggcctgaattgcaagacgacataccccacatcctggcccaggctcgcaaaattctgttcgtgatcgacggattcgacgagctgggggctgcacccggtgcattgatcgaagatatctgtggggactgggaaaagaagaagcctgtgccagtacttcttggcagcctgctcaatcgtgtcatgctgccaaaggctgctctgcttgtgacgacgcgtcccagagcccttagagatctaagaatactggctgaagaacccatctacatcagggttgagggatttctggaggaagatcgcagggcttattttctgagacactttggggatgaggatcaggcaatgagggccttcgaacttatgcgtagcaatgccgctctgttccagttgggcagtgcccctgccgtgtgttggatcgtttgcactaccctgaaattacagatggaaaagggggaggaccctgttcccacatgcttgacacggaccggcttgttcctcagattcttgtgtagccggtttccacagggcgctcaattgcgcggtgccctgcgcacgctctctcttctggccgcacaggggttgtgggcgcagacgtctgttctgcaccgcgaggatctcgagcggctgggcgtgcaggagtcagaccttcgactattcctcgacggcgacatccttagacaggacagagtctccaaaggatgttacagttttatccacctgtcatttcagcagtttctgaccgcactcttttacactcttgagaaagaagaggaagaggatagggatggccacacatgggacatcggcgatgtccaaaagcttctaagtggggttgaacggctcagaaacccagaccttatccaagccggatactatagtttcggtctggccaatgaaaaacgcgcaaaggaactagaagccacttttggttgcaggatgagcccggacatcaagcaggagctcctgcgctgcgacatctcgtgcaagggcggacactctactgtcaccgatctccaggagttgttagggtgcctgtacgaaagccaggaggaagagctggttaaggaagtgatggcacagttcaaagaaatctccctccatctaaatgccgtagatgtagtgccaagcagtttctgcgtgaaacactgcaggaaccttcagaagatgtcactgcaagtaatcaaggaaaatttaccggagaatgtgacagcctccgagtccgatgctgaggtggaacgtagtcaggatgatcagcacatgctgcctttctggaccgacctttgctccatcttcggctctaacaaagacttaatgggccttgcaatcaatgactccttcctctcagcaagcctggtgcgaatcctgtgcgaacagattgctagtgatacttgtcatctgcagcgggttgtgtttaaaaacataagtccggctgatgcccatcggaatctctgtctggcgttaagagggcataaaactgtgacttatctgaccctgcaggggaacgaccaggatgatatgttccccgctctgtgtgaggtcttaaggcatcctgaatgtaatctgcgttacttaggcctggtttcttgcagtgcaactactcagcagtgggcagatttgtctctggccctagaagttaatcagtcccttacttgtgttaatttgagcgacaacgagctgctggatgaaggcgctaagctgctgtacactactctgcggcaccccaaatgcttccttcagagactctcactggagaactgccacttaacggaggccaactgcaaagatttagccgcagtgctcgtggtgtcccgggagctaacgcatctgtgcctggccaaaaaccctatcggaaatacaggcgtgaagttcttatgcgaaggactgcgctacccagagtgcaagctccagacactcgtgctctggaactgcgacattaccagtgacggatgttgcgatctgactaaacttttgcaggagaagagcagtttattatgtcttgacctgggtctgaaccatataggggtgaagggtatgaaattcctctgcgaggcactgcgaaagcccctgtgtaatcttcggtgcctgtggctttggggttgctcgattcctccttttagctgcgaggacctctgttctgctctgagctgcaatcagagcctagtcacactggacttgggccagaacccactcggtagttctggagtgaaaatgttatttgagactctcacttgcagttccggcaccctgcggacactccggttgaagatcgatgatttcaatgatgaactgaataagctgctggaagaaatcgaggagaagaacccccaactgattatcgatacagaaaaacaccacccttgggctgagaggccatcatctcacgatttcatgatttag

SEQ ID NO: 31339 - DNA, 1809 bp, synthetic construct
  source 1..1809: mol_type = other DNA; note = Synthetic coding sequence
atgagtgacaaatcagatctaaaggctgaactggaaagaaaaaagcagcgactcgcccagatccgggaggaaaaaaaacgcaaagaagaggaaagaaaaaaaaaggaggcggatatgcagcaaaaaaaagaacctgtccaagatgattccgacctagatcgcaagagacgcgagacggaagccttgcttcagtcgattggtatcagccctgaaccccctcttgtacccaccccaatgtctccctcaagcaagtctgtcagcacaccatcggaggctggttcccaggatagcggtgatctgggacccctgacaaggagaagattacacaaactgggagtaagcaaggtgactcaggtggatttcctgcctcgggaagtggttagttactccaaagaaacacaaacacccttggccacccaccagagcgaggaggatgaagaggacgaggagatggtggagagcaaggtgggacaggactcagagcttgaaaaccaggataaaaagcaggaagtcaaggaagccccacccagggaactcacagaggaggagaagcagcaaattcttcatagtgaagaatttctcatattctttgaccgcacgatcagggtgatcgaaagggccttggccgaagatagcgacatttttttcgactattctggcagggagctcgaagagaaagatggggatgttcaggctggagccaatctttcattcaatcgtcagttctacgatgagcattggtcaaagcatagagtcgtgacttgcatggattggtcgctgcagtatcctgagctcatggtggcttcctataataataatgaggacgcaccccacgagcccgacggggtagccctcgtgtggaatatgaaattcaaaaagacgaccccagaatacgtttttcactgccaaagctccgtgatgtcagtctgtttcgcgaggttccatcctaacctggttgtcggtgggacctactccggacagatcgtcctctgggacaatcgatcccaccggaggactcccgtacagcggactcctctttccgccgctgctcatacgcacccagtctactgtgtgaatgtcgttggtacccagaacgcccacaacctgatcactgtctcaacggatgggaagatgtgctcttggtctctggacatgctgtccacgccacaggagagcatggaactggtgtacaacaagagcaagcctgtggcagtgacaggcatggccttccctacaggagacgtgaacaatttcgtggttgggagtgaggagggcaccgtgtatactgcctgtcggcatgggagtaaggctggcatcggagaggtgttcgaaggacatcaaggacctgttactggcataaactgtcacatggctgtcggccctattgatttcagtcacctgtttgtcacgagctcattcgactggacagtcaagctttggaccacgaaacacaataagcccttgtattcgttcgaggataacgcggactatgtgtacgatgttatgtggtctcctgtgcatcccgctctctttgcctgcgtcgatggcatggggcgactggacctttggaatttgaacaacgacacagaagtgccgacggcttctgtagcgatcgagggggctagcgcccttaatagagtcagatgggctcaagccggtaaggaagtggcggtcggagactcagaagggagaatctgggtgtacgacgtgggagagggactcgctatgctgccaggctggtcccagaactcctggactcaggccatcctgctctgctggccacccaaggtcctgggcctacagacatag

SEQ ID NO: 31340 - DNA, 2847 bp, synthetic construct
  source 1..2847: mol_type = other DNA; note = Synthetic coding sequence
atgtatgggtccgcacgatccgtcgggaaggtcgagccatcttctcaatcacccggtcgatcaccacgcctcccaaggagtccaagactaggccatcgcagaaccaattctaccggaggcagcagcggatcatccgtcgggggtggcagcgggaagacgttgtctatggagaatatacaatctctgaatgccgcttatgcaacaagtgggcctatgtacctcagcgatcatgagaatgtgggaagtgaaacacctaagagcactatgactctgggccgatctggcggacgactgccttatggagtgagaatgacagcaatgggatcaagtccaaacattgcctctagcggagtggctagtgacaccattgccttcggagagcatcatctcccacctgtgtcaatggcttccacagtccctcattccctgagacaggctagagacaatacaataatggatttacagactcagttgaaagaggtgcttcgcgagaatgatcttcttagaaaagacgtggaagtgaaagagtctaagctgtcgtccagtatgaattcgataaaaacattctggtcacccgaactgaagaaagagcgggctctcaggaaggacgaggctagcaagatcacaatttggaaagaacaatatcgagtggtgcaggaagaaaaccaacatatgcagatgacgatccaggcgctccaagacgagctaaggatccagagagacctgaatcagcttttccaacaggacagctccagtcggacaggcgagccctgtgttgccgagctcacagaagagaacttccagaggttacacgcagagcatgagagacaggctaaagagctcttcctcttgagaaagaccctcgaagaaatggagcttcgcatcgaaacgcaaaagcagactctgaacgcaagagatgagagtataaaaaagttgctggagatgctacagagcaagggcctctcagccaaagccactgaggaggatcacgagcgcactcggagactggccgaagcggaaatgcatgttcaccacttagaatcactcttggaacagaaggagaaagagaattccatgctgcgcgaggaaatgcatagacggttcgagaatgctcctgattctgcgaagacaaaggcccttcagacagtgatagagatgaaggatagcaaaatcagttctatggagcgcggtctgcgggatctggaggaggagattcagatgctaaaatccaacggagcgctgagtactgaagaaagagaggaggagatgaagcagatggaggtatacaggtcccacagtaaatttatgaagaataaaattggccaggtgaaacaggagttatcaagaaaagacaccgaattgttggctcttcagaccaaactggagactcttactaaccaattcagcgacagcaaacagcacattgaggtactgaaagagtccctcacagccaaggagcagagagccgctattctccagactgaagtggacgccctgagattgaggctagaagagaaggagactatgctgaacaagaaaactaagcagatccaggacatggctgaagaaaagggcacgcaagctggcgagattcacgatttaaaggacatgctcgacgtgaaagagagaaaagtaaacgtgctgcagaagaagatcgagaatcttcaggagcagctacgggacaaagagaagcagatgtctagcctgaaagagcgcgtgaagtccctacaggcagatacaaccaatacggacaccgctttgacaacactggaagaagctttggcggagaaggaaagaaccattgagcgtctgaaggagcagagggaccgggacgagagagagaaacaggaggagatcgacaattacaagaaagatctgaaagatttaaaagagaaggtgagcctgctgcagggagaccttagcgagaaagaggccagtctcttagatctgaaggagcacgcttccagtctggcgagctccggcctcaaaaaggactccagactgaagacattagagatcgccctagagcagaagaaggaagagtgcctgaagatggaatcccaactgaagaaggcgcacgaagcagcgctagaggccagggcgtccccggagatgtctgaccggatccagcaccttgagcgcgagattacccgctacaaggacgaatccagtaaagcccaggctgaagtggaccggttgttagagatcctgaaggaagtagagaacgaaaaaaacgacaaagataaaaaaatcgccgagctcgagtccctgttttcccgccaggttaaggaccagaacaagaaagtggcaaatctgaaacacaaggagcaggtcgagaagaagaagtccgctcaaatgctggaggaggcccgtcggagagaagacaacttaaacgacagcagtcagcaactgcaggtggaggagttactcatggctatggagaaagtgaagcaggagctggagtcgatgaaggctaaactcagctctactcagcaaagtttagctgaaaaggagacgcacctcacaaatctacgagcggagaggaggaaacacctggaagaagttcttgaaatgaagcaggaggccctcctggctgcgatttctgagaaggacgccaacatagctctactagaactgtcgtcctcaaaaaagaaaacccaggaagaggtagcagccctgaagcgggagaaggaccgtctggtccagcagctcaaacagcagacgcagaaccgcatgaaactcatggcggacaactacgaggacgaccactttaagtcctcacacagtaaccaaacaaaccacaagccttcacctgatcaggacgaggaggagggcatatgggcctag

SEQ ID NO: 31341 - DNA, 2742 bp, synthetic construct
  source 1..2742: mol_type = other DNA; note = Synthetic coding sequence
atggaagtagggagtgaagaggaaaaatgggagaaattggatgcagagttcgaccacttcgtagtcgatatgaagccatttgtcttgaaactcccgcatcgaaccgagagacaacggtgcgccctgtggattcgcaagctgtgtgaacctagcggcaccggggcaggcatcatgggcagaaagaacaggaatctgtacgcaaaactgctcctgcacatgctaaagaggggggcactggaaggcccttttactcacagaccagagcctgggaccctgaaaatcctcccatcgtatatgtctatatactttgacgagccaaaccccgctcgcgctaaaggctccagcccagaggggctgcccgcatgggtgttgggcgagttggaaacttcggagcacaaactgaacgaaagttggaagctgtccagtggtgaggataacaccttagtgcagagccctacggatgtttattcccgcgaacagtatactgggaaattgagagtccgctcccatagtctgagtccaacccatcgagaggatgggcagaacatcaccccaaagatctgtgaagtctattccaagaagtcccccgttagcttggacgactcggatatcgaagccagactaaactcatggaacctcgggcttgatatgaagacgaagatgatggaggccaagtttcacgaggaaaagctgaaattacaacagaagcacgacgcagacgtgcagaagatattggaacggaagaataacgaaatcgaagagctgaaaaccctgtatcgttctaaacaacatgagacggaggaaaccatacgaaagctcgaaaaaaaggtccagactttaattagagattgccaggtgatcagagaaacaaaggaggaccagatcgccgaactgaagaaaatttgcgagcagtccacagaatcactgaacaacgactgggagaagaagctgcacaacgctgtggccgaaatggaacaggaaaagttcgatctgcaaaagcaacacactgaaaacattcaggagctactcgaggacaccaacgtgaggctaaacaaaatggaatcagaatatatggcccaaacacagagtacaaatcatatgattaaggagctggaggctagggtgcagcaactgaccggtgaagctgaaaactctaacctccagcggcagaagctgattcaagagaaagctgagctggagcggtgctatcagattacatgttccgagcttcaggaggtgaaagcccgtcgtaatacactccacaaagagaaagatcatctcgtaaatgactatgagcagaacatgaagctgctgcagactaagtatgatgcagacattaatctcctgaaacaggaacatgcgctgagcgcttcaaaagcgagctcaatgatcgaagaacttgaacagaacgtgtgccaactgaaacagcagctgcaggagtccgaactccagcgtaagcagcagctgagagaccaagaaaataagtttcagatggaaaaatcacacctcaaacacatatatgagaaaaaagctcacgatcttcagtccgagcttgacaagggaaaggaggatacgcagaaaaagatccacaagtttgaggaagcgcttaaagaaaaagaagagcagctaacaagggtcaccgaggtgcagagactgcaagctcagcaagctgatgctgcacttgaggagtttaagaggcaagtggagctgaattcggagaaggtttacgccgagatgaaggagcagatggagaaggttgaagccgaccttaccaggtcaaagtctctcagggagaagcagtcaaaggagtttctatggcagctcgaggatatcaggcaaaggtacgagcagcaaattgttgaactgaaactggagcatgagcaagagaagacccatttgttacagcagcacaatgctgagaaggacagcctggtgagggatcatgagcgggaaattgaaaatttggagaagcagctgcgtgctgccaacatggaacacgaaaatcagatacaagagttcaagaaaagagacgcacaggtgattgcagacatggaggcacaggttcacaagttgagggaggagctgatcaatgtcaattctcaacgaaagcagcagctcgttgagctgggccttcttagagaagaggaaaagcagagagccacgcgggaacatgaaatcgtcgtcaacaaacttaaagcggagagtgagaagatgaaaattgagctgaaaaaaacgcacgccgcagagaccgagatgacacttgaaaaagccaattccaaactgaagcagatcgagaaagagtacactcagaaactcgccaaaagcagccagattattgccgagctccaaactaccatcagttccctgaaggaagaaaactcccagcagcagctggcagcggaacggaggttgcaggacgtgcggcagaagttcgaggacgagaagaagcagctaatccgcgacaatgaccaggcgattaaagtactccaggacgagctcgaaaaccgaagcaaccaggtccggtgtgctgagaagaagcttcagcataaagagctggagtcccaggaacagatcacatacatcaggcaagagtacgaaacaaagctgaagggtttgatgccagcatccttgcggcaggaattagaagacactatctcctctctgaagtcacaagttaattttttacagaaaagagcctcaattcttcaagaggagcttaccacttaccagggcaggcggtag

SEQ ID NO: 31342 - DNA, 825 bp, synthetic construct
  source 1..825: mol_type = other DNA; note = Synthetic coding sequence
atgcaggacgagaaactacgggacgaaaccgagcagcccgtgagtaaagtcatcgaacgaaatcgtctgcgaacagtgctgaagaatctaagtttgctcaagctactgaaatcttccaaccgaaggattcaagaactgcacaagttagctaagaggtgctggcatagcttactctcggtcccgaaaattctgcgcatttccagtggagagaattctgcgtgcaacaaaactaagcagaataatgaagagttccaggaaatcggctgctctgaaaaggaactgaagtctaagaagctggagtcaaccggtgatcccaagaagaaggaatataaggaatggaaatcacaggtgcagtctggcatgagaaataaggagaaaacttcgctcgcagccatgcctcgcaaagagaaacacatagagcccgaagtgccacggaccagccgagatgattcactgaaccccggagttcaagggagacagcccctcactgagggacctcgagtcatcttcatcaagccctaccgtaatcggaccccaatgggccacatgaaacagttagatgtggctgaccagtggatatggtttgaggggctccccactcgaatccatctgcctgccccaagggtgatgtgtcgttctagcacgcttagatgggtaaagcgccgatgcactcgattttgctccgcgagcctagaaatgccaatgtggcacccttacaaagtcgatgtgacttggacccgagccaggggggctagcaggggttggcggagccgccaccaattgaaaggcaggaacggctggcgtaactctagagtatataagtag

SEQ ID NO: 31343 - DNA, 156 bp, synthetic construct
  source 1..156: mol_type = other DNA; note = Synthetic coding sequence
atgcagctccggcacattggagacaacatcgatcaccggatggtacgtgaggatctgcagcaggacggcagggatgcactcgatcacttcgtcttttttttctttcgtagggtccaggttttgttacacttcttctggaataatcatttactctag

SEQ ID NO: 31344 - DNA, 444 bp, synthetic construct
  source 1..444: mol_type = other DNA; note = Synthetic coding sequence
atggctggtggcgcaagagaagtcctgacattacagctcggccacttcgcgggatttgtgggcgctcattggtggaaccagcaggatgccgcacttggcagggcaacagattcaaaagagccccctggagagttatgccctgatgttctctataggaccggaaggacccttcatggccaggagacttacacaccacgactgatcctgatggacttgaagggaagcctgagcagtctgaaggaggaggggggtctttacagggataaacagctggatgctgcaattgcttggcagggtaaactgaccacacacaaggaagagctctatcctaaaaatccgtaccttcaggattttctctccgcggaagtgcgggcttctgtcctcaactttctgacgcgctgtcacaacttaagagtgtctatcggcgcagggtccgcggagtag

SEQ ID NO: 31345 - DNA, 1677 bp, synthetic construct
  source 1..1677: mol_type = other DNA; note = Synthetic coding sequence
atgtccgtcagtgtccacgaaaccaggaagagccgatcttccactggctccatgaatgtgacattgttccacaaggccagccaccccgattgcgtgctcgcagcgtctagtcgctatttcgaggccatgtttagtcacggcctgagagagtcgcgggatgacacggttaatttccaggacaatctgcatcctgaggtccttgagttactgctggattttgcatactcaagccggatagcaatcaatgaggaaaacgctgagagcctgctggaggcaggagatatgttgcaatttcacgatgtccgggatgccgctgctgagttcctcgagaagaatctgttccccagtaactgtctgggtatgatgcttctcagtgacgctcaccaatgccggaggctgtacgagtttagctggcggatgtgcttggtccatttcgagacagtgcgccagtcagaggacttcaactccctctccaaagatactcttctcgatctaatatcaagtgacgagctggagaccgaggacgaacgtgtagtcttcgaagcaatcctgcagtgggtaaaacatgacttggagccccgtaaagtccaccttcctgagctgctgaggagtgttcgcttggcactgctcccatcggattgtctgcaggaggctgtgtcttctgaggctctgcttatggccgacgaacgcacaaagttgatcatggacgaggccttgaggtgcaagaccaggattctgcagaatgacggtgttgttacctccccgtgtgcaaggccaaggaaggctggacacaccctgttgatactggggggtcagacatttatgtgtgataagatatatcaggttgatcataaggcaaaagaaattatccccaaggctgatctgccttctcctcgcaaggagttctccgcttctgctatcggttgcaaagtttacgtgaccggcggtcggggtagtgagaacggggtgtccaaggacgtctgggtctatgatactgtgcacgaagaatggtcaaaggctgccccaatgctgattgcacggttcggacatggatctgctgaactggagaattgcctttatgtagttggtggccacacatcgctggccggtgtgttccctgcttccccctctgtgagtctcaaacaggtcgagaaatacgatccgggtgcaaacaaatggatgatggtggcaccgctgcgcgacggggtgtctaacgccgcagtagtgagcgcaaagcttaagctgttcgtgtttggcggtactagtattcacagagatatggtaagcaaggtacagtgctatgacccctctgagaaccgctggaccattaaggcagagtgtccccagccttggcgctacacagccgctgctgtcctcggtagccaaatctttatcatgggcggtgacaccgagtttacagctgcgtcagcctatcggtttgattgcgagactaaccaatggacccggattggagacatgaccgcaaaaagaatgagttgtcatgcactcgcatcgggaaataagttgtacgtggtaggcggttattttgggacgcagagatgtaagactttggattgctatgatcccacatctgatacttggaattgtattaccacagttccatacagcctcattccaactgcatttgtgtccacatggaaacatctgcctgcatag

SEQ ID NO: 31346 - DNA, 2916 bp, synthetic construct
  source 1..2916: mol_type = other DNA; note = Synthetic coding sequence
atgaatttccttagaggagtgatggggggacagtctgcgggaccacagcataccgaagctgaaaccgttcggggagcagccggtctggggttggggaaaggttccggccagggacgaggcagatctactcgccgtcccgaagagtgcggcctcaagtttcgacactcttttaggctggtcaaacacattctttatcacgtgaccatcaatgttagtgactccgagatcatagggtatgcgctggatacactctataacatcatcagcaacgaggaggaagaggaagttgggggttcgcaagaagaaaactccacgagacagagcgaggacttggggtcacagtttacagaaatttttattaagcaacaagagaacgtcaccttactcttgagtctcctcgaagaatttgatttccacgtgcgctggcccggtgttaaactgcttactagtctgctgaaacagcttggaccccaggttcaacaaatcatcctggtcagcccaatgggagtgagcagactgatggatctcctggccgattcaagggaagtgatcaggaacgatggggtgctacttctgcaggcgttgacaagaagtaacggagcgattcagaagattgtggcttttgaaaatgcgtttgagaggctcctggacattatttctgaggagggaaactctgacggtggaatcgtggtggaggactgccttatcctcctgcaaaacctactcaagaataacaattccaatcagaacttcttcaaagaaggatcttatattcagcgcatgaagccatggttcgaggtgggcgatgaaaacagtggatggtcggcccagaaagtcaccaatttgcatttgatgctccagctggtaagggtcctggtatcaccaacgaatccccctggggctacatcatcctgccaaaaagcaatgttccaatgtggcctgctgcaacagctttgcacgattctgatggccaccggtgtaccggctgatatcttgaccgagaccatcaacactgtttccgaggttattcggggatgccaagtaaatcaggattatttcgcctctgtcaatgctccctcaaatccaccccgtcccgcaatcgttgtgctgttaatgtctatggtcaacgagagacagccatttgtgctccgatgtgctgtgctctactgcttccaatgctttctttataaaaaccagaagggacagggcgagatcgtgagtactttactgccttcaactattgacgccaccgggaatagcgtctctgcaggacagctgttgtgtggagggttgttctccaccgactctctctctaattggtgcgctgccgttgcattagctcacgccctccaggaaaacgcaactcagaaggaacagttgctgcgcgtccagctcgctacatctattgggaaccccccagtctctttactccagcaatgtactaatatcctttcacagggagataagattgatcgacgaggaagtaaaatacagactcgcgtaggtttgctgatgctcctgtgcacatggctttcaaactgtcccattgcagtgacacattttctgcacaacagcgccaacgttccgttccttacaggccagattgccgagaacctaggggaagaggaacaactcgtgcagggcctttgcgccctcctcttagggatctcaatctatttcaacgacaatagcctggagtcttatatgaaagagaaactcaagcaactgattgaaaagcggatcggtaaagaaaattttatcgaaaaactaggttttatctctaagcatgaattgtacagtagagcttctcagaagcctcagcccaattttccaagtcccgagtacatgattttcgatcacgagtttacaaagctggtgaaagagctggagggagtcattacaaaagctatttacaagagcagcgaagaagacaaaaaagaagaggaagtgaaaaagaccctcgagcagcacgataatattgtgactcactacaagaacatgattagagagcaggatctccaactggaagaacttcggcaacaggttagtacactcaaatgtcagaacgagcagcttcagaccgctgtgactcagcaggtgagccaaatccagcagcataaggaccagtacaacttacttaagatccagctgggcaaggacaatcaacaccaggggtcgtactccgagggtgcccagatgaatgggatacaacccgaggagatcggcagactaagggaggagattgaagagctgaagcggaaccaagaactactgcagagccagttaactgaaaaggactccatgattgagaatatgaagagctcacaaacgagtggcaccaatgaacaaagcagcgccatcgtttcggcaagggatagtgagcaagttgccgagttgaagcaggaacttgctacgttaaagagtcagttaaattctcaatccgtcgaaataaccaaactgcagacagagaaacaagaattactgcagaagacagaagcattcgcaaagagcgtagaagtgcagggcgagaccgaaaccatcatcgcgactaagactacagacgtggaaggccgtctcagcgcactactgcaggaaacaaaagagctgaaaaacgaaattaaagccttgagtgaggagcgcaccgcaataaaagagcagcttgactcatctaatagtacaatcgctatactgcagacagagaaggacaagctcgagttggagattaccgactccaagaaggagcaagatgacttgctggtgctcctcgcagaccaggaccagaagattctttcgctgaagaataaactcaaggaccttggacaccccgtggaggaagaagatgagctggagtccggcgaccaggaagatgaggatgatgagtctgaggatcctgggaaagacctggaccacatctag

SEQ ID NO: 31347 - DNA, 258 bp, synthetic construct
  source 1..258: mol_type = other DNA; note = Synthetic coding sequence
atgggcaattctgactctcagtacacacttcaggggtctaaaaatcattcaaacacaataactggcgctaagcagataccctgttctcttaagatccggggtattcacgccaaggaggaaaagagcttacatgggtggggccacggttccaacggtgcaggctataaaagcagatctctagcgagaagctgtctgtcacacttcaaaagcaaccaaccatatgcctctagactgggtggaccaacatgcaaagtatag

SEQ ID NO: 31348 - DNA, 174 bp, synthetic construct
  source 1..174: mol_type = other DNA; note = Synthetic coding sequence
tgaggacgcgcacccggacccgcaatcgggggaaggagagccggtgactcgtgtcccggatggcgcagacggtcccgcagtcgaggacggggacagcgcctctcccacggtcctcggcgacgaccacaacttcttactgagactcgtcggcctgtgctcgttcagtggttgtag

SEQ ID NO: 31349 - DNA, 936 bp, synthetic construct
  source 1..936: mol_type = other DNA; note = Synthetic coding sequence
atggtatctttgcgcgttaacccgttgtctctggtcgagataatcctccacgtcgttagacaaatgacagaccctaacgtggccctcacattcctcgaaaaaacacgggaaaaagtgaagtctagcgacgaagcagtcattttgtgcaagaccgcgatcggggcactaaagttaaatattggagatctgcaagtgactaaggagacaatcgaagacgtggaagagatgctcaataacttaccaggtgttacatctgtccattccaggttctacgatctgtcatccaaatactatcagacaattgggaatcacgcaagctactataaagatgccctgagatttcttgggtgtgtcgatattaaagatctgcccgtgagtgaacaacaggaacgggcttttacactggggttggcaggcctgttgggagagggcgtcttcaactttggcgaacttctgatgcatccagtactagaatcacttaggaatactgaccggcagtggctgattgacacgctctatgcatttaatagtggaaacgtggagaggtttcagacgctgaagacagcatggggacagcagcctgatctcgccgcaaatgaagcccagctgctgagaaaaatacagctgctatgtctgatggagatgacattcacccggcctgccaaccatcgccaactcacctttgaggaaatcgcgaagagcgccaagatcacagtgaatgaagtggaacttctagtcatgaaggccctcagcgttgggctggttaagggctccatcgacgaggtggataagcgagtgcatatgacgtgggtgcagcctagggtgcttgacttgcagcagatcaaaggaatgaaggatcggcttgagttttggtgcacagatgtgaaatccatggagatgctcgtagaacaccaagctcatgacattctcacttag

SEQ ID NO: 31350 - DNA, 1161 bp, synthetic construct
  source 1..1161: mol_type = other DNA; note = Synthetic coding sequence
atgaagagcctgaaagcctgcaaacgagagattaagagtgtgatgaataccgctgggaactctgcaccatctttgtttttgaagagcaactttgagtacttacgaggcaattaccgtaaggccgtgaagttgttgaattccagtaacattgccgaacatccgggattcatgaaaactggcgagtgtcttagatgtatgttctggaataatctggggtgtattcacttcgccatgagcaaacacaacctaggcattttctactttaaaaaagccctgcaggagaatgacaatgtttgcgctcaactaagtgctggctcaaccgaccccggaaaaaagttttcaggcaggcccatgtgcactctgctgactaacaagcggtacgaactgttgtacaattgcggtatccagctgctacacattggtaggcctctggccgctttcgaatgcctaattgaggccgtgcaagtgtaccacgccaatcctcgactgtggctcaggttggcggaatgctgtattgcagcaaataagggaacatcagaacaagaaactaagggattgccttccaaaaaagggatcgtccagtctatagtcgggcaagggtatcatagaaagatcgttctggctagccagagtattcagaatacagtttataacgatggccagtcctcagccatccccgtggccagcatggagttcgccgctatttgtctccgaaatgcccttctgctgctgccggaagaacagcaagatcctaagcaggaaaatggggcaaagaattctaaccaactgggcggaaacacagagtcttccgagagctccgagacttgtagtagcaagagccatgatggcgacaaatttataccggctccaccttcaagcccactccgcaagcaggagctggagaatctcaaatgtagcattttggcatgttccgcttacgtcgccctggccctcggcgacaatctcatggctctcaaccacgctgacaagctgctccagcagccgaaactgagcgggagccttaaattcctcggtcatctttacgccgcagaagctctcatttctttggaccggatcagcgatgctattactcacttgaacccagagaacgttacagatgtatccctcggaatcagcagtaatgaacaggatcaggggtag

SEQ ID NO: 31351 - DNA, 1596 bp, synthetic construct
  source 1..1596: mol_type = other DNA; note = Synthetic coding sequence
atgcttcaagaactcaatttcggagcctatcttggcctccctgccttcctgctccccctgaatcaggaagacaatacaaatctcgctcgggtgctgactaatcatattcacaccggtcaccactcatccatgttctggatgagggtcccactggttgcccctgaggaccttcgggacgacatcatcgaaaatgcgcctacgactcataccgaggagtacagcggtgaggagaaaacctggatgtggtggcacaactttcggactctgtgtgactattctaagagaatcgccgtggctctcgaaatcggtgctgacctccctagcaaccatgtgattgacagatggctgggggaaccaatcaaggccgctatattgccgaccagcatatttctcacgaataaaaaggggttccccgtgttatctaagatgcatcagcgactcatcttcagactgcttaagttagaagttcagtttatcattacagggaccaatcatcattcagagaaggaattctgtagctatttgcagtatctggagtacctgtcccagaacaggcctcccccaaatgcttatgaactgttcgcaaagggctacgaggactacttgcagtcgccactgcagcctttgatggacaacctagagtcccaaacatatgaggtttttgaaaaggatcctattaagtatagtcaatatcaacaagccatatacaagtgccttttagaccgagtaccagaggaggagaaggacaccaatgtacaagtgctcatggtgctgggggctggaagggggcctcttgttaatgccagtctgagggccgcaaaacaggcagacagaagaataaaactgtacgccgtggagaaaaacccaaacgccgtagtaacgttggaaaactggcagttcgaagagtggggatctcaggtgactgtggtatcaagcgatatgagagaatgggttgcccctgaaaaggcggacatcatagtgtcagagcttctgggatcattcgccgacaatgagttaagtccagagtgccttgatggcgcacagcactttcttaaggacgatggcgtgtcaatcccaggagaatacacaagttttcttgccccaatatcctccagcaagttgtacaacgaggtgagggcttgtcgcgaaaaagacagagaccctgaggcccagtttgaaatgccttacgtcgtgcgactgcacaattttcaccaactctctgctccacaaccttgctttaccttctcacatcctaacagggatcccatgatcgacaataaccggtattgtacacttgaattccctgttgaagttaacactgtgctgcacggtttcgctggatactttgagaccgtcctctaccaggacataaccctgtccatacggcctgagacacactcccccggaatgtttagctggttccccatcctgttcccaatcaagcagcccatcacggtgagagagggccaaacaatatgcgtgaggttctggaggtgctccaattccaagaaagtgtggtacgagtgggcggttacggcacccgtatgtagtgccattcataatcctacaggtaggtcctacactatcggactgtag

SEQ ID NO: 31352 - DNA, 789 bp, synthetic construct
  source 1..789: mol_type = other DNA; note = Synthetic coding sequence
atggctctctcactaggttggaaagcacacaggaatcactgtggattgttactacaggcactacgtagcagtggcctcctgctttttccttgtgggcaatgtccttggcggggagccggttcctttctcgacccagaaattaaggctttccttgaggaaaatacagaggtgaccagctcgggatcactcacaccggagattcagcttagactgcttactcctcggtgtaaattctggtgggaacgcgctgacctgtggcctcatagcgatccgtattgggcaatctactggcctggcggacaggcactaagcaggtacctcctcgataatcccgatgttgtgcggggaaaaagcgtcttagacttgggctctggttgcggagctacagcaattgccgcaaagatgagtggcgcaagtcgcattctggcaaacgacattgacccaattgctgggatggctatcaccctaaactgtgaactcaaccgcttgaacccctttcccatactcattcaaaatatcctcaatctggagcaggataagtgggaccttgtcgtactcggtgacatgttttacgatgaagatctggcagatagtcttcatcaatggctcaaaaaatgtttttggacatatcgtactagagtcctcatcggggacccaggaaggccgcagttttcgggccactctatccaacaccacttacacaaggtagtggagtactctctgttagagtccaccagacaggaaaattccgggttgaccacctctaccgtatggggattccagccatag

SEQ ID NO: 31353 - DNA, 1131 bp, synthetic construct
  source 1..1131: mol_type = other DNA; note = Synthetic coding sequence
atggctgccccatccccgagcggaacacctgtgagctccatgcaggggaaacgcaaggctctaaagctcaactttgccaaccccccttttaagtctaccgccaggttcacactgaaccctaatccgactggagtgcagaacccgcacatagagcgccttagaactcacagtatcgaatcctccggaaaattgaaaataagccccgaacaacactgggatttcacagctgaagatctgaaggatctgggcgagatcggtaggggcgcttatggcagtgtgaacaagatggtgcataagcccagcggacagatcatggccgtcaaaagaattaggtccacagtggatgaaaaggagcagaagcagctcctgatggacctggacgtggttatgaggagttctgactgcccttacatcgtccaattctacggtgccctgtttcgcgaaggcgattgttggatctgtatggagttaatgtcaacatcattcgataagttctacaagtacgtctacagtgtcctcgacgatgtcatccctgaagagatcctcgggaagattactttggccacagtgaaagcccttaatcacctgaaggagaacctgaaaatcatccaccgtgatataaaacctagtaatatactgttggatcgctccggcaatattaagctctgtgacttcgggataagtggacagcttgttgacagtattgctaagactagggatgccggatgtcgaccttacatggctcctgaaaggatcgatccctccgccagccggcagggctacgacgttcgcagcgatgtgtggtctctgggcattacattgtatgagctggccacaggccgattcccgtatcccaaatggaacagcgtgtttgaccaactgacccaggtcgtcaaaggagaccctccgcagctgagcaactcggaggagcgtgagttcagtcctagcttcatcaatttcgttaatctctgcttgactaaggatgaatcgaaacgtcccaaatacaaggaactacttaaacatccctttattctcatgtatgaggagagagctgttgaagttgcctgttacgtgtgcaagattttagatcagatgcctgccaccccttccagccccatgtatgtggactag

SEQ ID NO: 31354 - DNA, 1035 bp, synthetic construct
  source 1..1035: mol_type = other DNA; note = Synthetic coding sequence
atggcgggaagcgggtgcgcctggggcgctgagcccccacgattccttgaagccttcggtcgcctgtggcaggtgcagtctagactggggtcgggtagctccgcttccgtgtaccgtgtgcggtgctgtggcaatcctggatctccccctggggcacttaaacagtttcttccccctggaaccaccggcgctgctgccagcgctgctgaatatggattcagaaaagagcgggcagctcttgaacaactccaagggcaccgtaatatcgtgaccttgtacggggtgttcaccattcacttttccccaaacgttccatctcgctgcttgctgcttgaactgttggatgtctcggtgtcagaactcctgttgtacagtagccaccagggctgttcaatgtggatgattcagcactgtgcaagggatgttttggaggccctcgcattcctccatcatgaagggtacgtgcatgctgaccttaaacccagaaacattctgtggtcagctgagaatgagtgcttcaaactcatcgactttggactcagtttcaaggaaggcaaccaagatgttaagtacatccaaacagacgggtaccgggcacctgaagccgagctgcaaaattgcctcgctcaagcgggattgcaaagtgatacggagtgtacttctgccgtggatctgtggtcgcttggaatcatactgctcgagatgttttcagggatgaaactcaagcacaccgtgaggagccaggagtggaaagccaactcaagcgctataattgaccatattttcgccagcaaagccgttgtaaacgccgctatacctgcctatcatctaagagatttaatcaaatcaatgctccatgacgacccctcgaggaggatccctgctgaaatggccttgtgtagtccatttttctccataccattcgccccacatattgaggatctggtgatgctccctacccccgtgctgcgactgctgaacgtgttggatgacgattatttagagaacgaagaagagtacgagggcttgtgctag

SEQ ID NO: 31355 - DNA, 1467 bp, synthetic construct
  source 1..1467: mol_type = other DNA; note = Synthetic coding sequence
atggcattaaagatgaacaccctgtcttcaaaccgcgcaaacatgctgaaggaagtgcagctaatgaataggttaagccaccccaacatactcaggttcatgggggtgtgcgtgcatcagggacagttacatgcgttaacagagtacatcaacagtgggaatctggaacaactcctggacagtaatctgcatctcccttggacagttagagtaaagctcgcctacgacatagccgtcggtttgagctatctgcacttcaaaggaatcttccacagagatctcacatcaaaaaactgcctgattaaacgggatgaaaatggatattctgccgtggtggccgactttggcctcgcggaaaaaattccggacgtgagcatggggtccgagaagcttgctgtggtgggtagcccattctggatggctcccgaggttcttcgtgacgaaccttataatgagaaggccgatgtcttctcttatggtattattttatgcgagatcatcgctagaatccaagcagatccagattatctcccacgtacagaaaattttggcctggattacgacgcgttccaacatatggtgggcgactgcccacctgactttttgcagctgacgtttaactgctgtaatatggaccctaagctgcgcccatcttttgtggaaatcgggaaaaccctggaagagatcttatctcggctgcaggaagaggaacaggagagagatcggaagttgcagcctactgctcggggactactcgagaaggcccctggagttaaacggctgagcagcctggacgacaaaatcccacacaagagcccctgccctagacgcacaatctggttgagccgctcccagagtgatatcttctcaaggaaacctcctcgtacggttagcgttttggacccctattaccgcccaagggacggggctgccagaacacccaaagtgaatcctttcagcgcacggcaggacctgatgggtggtaaaattaagttcttcgatctccccagtaagagcgtcatctccctggtgtttgacctggacgcaccgggaccaggcaccatgcccctggctgattggcaggagccattggctcctcctattcggcgttggcggagcctgcctgggagtcctgagtttctacatcaggaagcctgcccgttcgttggtagggaagagtctctttctgatgggcctccgcctcgcttgagctccctgaagtacagggtgaaggaaatccctccattccgggctagcgccctgcccgcagcccaggcccacgaggccatggactgtagtatcttacaggaggaaaacggcttcggctcgagaccacagggaacaagtccctgtcctgcaggggctagcgaggagatggaggtcgaggaacgaccagccggttcaacccctgcaacttttagcaccagtgggatcggcctgcaaacacaaggcaaacaggatggatag

SEQ ID NO: 31356 - DNA, 1458 bp, synthetic construct
  source 1..1458: mol_type = other DNA; note = Synthetic coding sequence
atgacactctggatccttccaaagttcaaggctgttgacttttcccccagcctggctgcttacacccacacttggcttctgcccaggtttttggaaattctgattcaatgcggtcattgcaaacgcctcgcccctgagtatgaagcagcggctaccaggctcaaggggattgtcccactcgctaaggtagattgcacagctaatactaatacatgcaataagtatggggtctctggctaccccacgctaaagatcttcagagatggtgaagaggcgggtgcatatgatggacccaggaccgcggacggcatcgtctcgcacttgaagaagcaggccggacccgcatcagtcccactgcggaccgaggaggaattcaaaaagttcatttccgataaagatgcatcaattgtgggcttctttgacgatagtttcagtgaagcccatagtgagtttctgaaagccgcaagcaacctgcgcgacaattaccgcttcgcccacactaatgtggagagtttggtcaatgagtacgacgacaacggtgaaggtatcattctcttccggccttcgcaccttaccaacaagttcgaggacaagactgtggcttataccgagcagaaaatgacatccggcaagattaagaaattcatccaggagaacattttcggcatttgtcctcacatgactgaggataataaagatctcattcaagggaaagacctgcttatcgcctactacgatgtagactacgagaagaacgcaaagggatcaaattactggcgaaacagagttatgatggtagcaaagaagttcctggacgcaggccataaactcaatttcgcagtagccagcaggaagaccttttcacacgaactcagcgactttggactggagtccactgctggagagattccagtagttgccatccgaaccgcaaaaggtgaaaagtttgtgatgcaggaagagtttagtagagatggcaaggctctggagcgattccttcaagactatttcgatggcaacctcaagcgatacctgaaatccgagcctattcccgagtcaaatgacggacccgtgaaggtggtcgttgcagaaaacttcgatgagattgtgaacaatgagaataaagacgtgcttatcgaattttacgctccctggtgtggccactgtaaaaacttagagcccaaatataaggagttgggcgaaaagctgtccaaagacccaaacatcgttatcgctaaaatggacgctacagctaatgacgtaccatctccctacgaagttagaggtttccccactatttatttctctcctgcaaacaaaaaactgaatccaaaaaaatatgagggaggacgggaactgagtgacttcatctcgtatctgcagcgagaggccactaacccgcctgtgatccaggaagagaaacccaaaaaaaaaaagaaagctcaggaagacctatag

SEQ ID NO: 31357 - DNA, 885 bp, synthetic construct
  source 1..885: mol_type = other DNA; note = Synthetic coding sequence
atgagcgctcagcacttcgtcagcactgagcaggtggagttgcccggtccgggacaatgggtggtggcagaatgtcctgccagagtagacttctccgggggttggtcggatactccccctcttgcttatgaactcggtggagcagtgctcggattagccgtacgcgtagatggtcgccgacctattggcgctagggcacgacggatacccgagccagagttatggctagccgtcggaccacgccaggacgagatgactgtcaaaattgtttgtagatgtctggcggatctgcgtgactactgtcaacctcatgcccctggagccctcctgaaagccgcttttatctgtgccggaatcgtccatgtccactcagagcttcaactgagtgagcaacttctcagaaccttcgggggagggttcgagctgcatacctggtctgagttgcctcacggatccggcctcggtacatcatcaattctcgccggaaccgccctggccgcactacagcgtgcagccggacgagtcgtcggcaccgaagcccttatccatgccgtactgcatcttgagcaggtgttgaccaccggtggcggatggcaagaccaggtaggcggactgatgcccggaattaaggtgggaaggtctagagcccagctcccactgaaagtggaagtagaagaggtgacagtgccagagggttttgtgcagaagcttaatgaccatctgcttctagtttataccgggaagacccggttggctcgaaacttgctccaggacgtgctgagatcttggtatgctagactgccagcggtggtgcagaacgcccatagcctggttagacagactgaagagtgcgctgaaggtttccgccaaggatcacacatctag

SEQ ID NO: 31358 - DNA, 945 bp, synthetic construct
  source 1..945: mol_type = other DNA; note = Synthetic coding sequence
gtgggtcggatggaaggctgtagcagcccaatagtggtgaagttcgccgacacccagaaagacaaagagcagcgacggctgcaacaacaactagcgcagcaaatgcagcagctcaacaccgccacctggggaaatttaacagggcttggtgggttgacaccacaatatctcgctctcctgcagcaagccacatcatcatcaaacctgggggcttttagcggcatacaacaaatggcgggaatgaacgccctccagctccaaaatttggctacactggcggcagctgcggctgccgcacagaccagcgcaaccagtaccaacgccaacccactgtcaacaacctcttcggctctgggcgcacttacatcccctgtcgcggcttcaaccccaaactcaactgcgggtgccgctatgaatagtctaacatccctagggactctgcaggggttagctggcgctaccgtcgggctgaataacattaatgctctcgcaggaatggctgctctgaatggaggcctgggcgctactggcctcacaaatgggacagctggtacaatggatgctctcactcaggcctattcaggaatacagcagtacgcagccgcagcacttcccaccctgtactcgcagagtctgttgcagcagcaaagcgctgctgggtcccagaaggagggcccagagggcgctaacctattcatatatcaccttcctcaagaatttggagaccaggatatactccaaatgttcatgcctttcgggaacgtgatctctgcgaaggtgtttatcgacaaacaaaccaacctcagtaaatgttttggtttcgtgtcctacgacaatcctgtttcagctcaagctgcaattcaggctatgaatggctttcagattggtatgaagcgactgaaagttcaactgaagcgatctaagaatgactcaaagccttattag

SEQ ID NO: 31359 - DNA, 1083 bp, synthetic construct
  source 1..1083: mol_type = other DNA; note = Synthetic coding sequence
tccatggaaaagacgtacactagtaccagcaacaattccatctctggctcactgaagcgacttgaagatacaaccgcacggttcaccaatgcaaactttcaggaggtaagtgcccataccagcagcggcaaggacgtctcagagacaagaggaagcgaaggcaaaggaaagaagtcttctgcacatagttcaggacaacgcggtaggaagcccggtggcggacggaatccagggactactgtatcagcagcttctcctttcccgcaggccggttataagcgggctcagactagtgggatcgaagaggagacagtcaaagagaagaagcgcaagggaaataaacaatctaaacacgggcctggacggccaaaggggaataaaaaccaggaaaatgtgagccacctgagtgtctcttcagcgtcccctacatcttccgtagcatccgcggctgggtctataaccagcagctcactgcagaagtcccctacattgttgaggaatggatcacttcagagtttatcagtgggtagtagccctgtggggtctgagattagcatgcaatataggcacgacggtgcctgcccaaccaccacgttttccgaactcctgaatgccatccacaacgatcgcggagacagctccaccctgaccaagcaagagctgaagttcattggcatttacaattcaaacgatgtcgcggtttctttccctaacgtggtgtctggtagcggttcctccacccctgtgagctcctcgcacttaccgcagcagtcctccggacacctccaacaggtgggcgctctgagcccctccgccgtctctagtgcagcacctgctgtagccacaacccaggcaaacacactgtctgggtcgagcctgtcgcaggcaccctcgcacatgtacggcaacagaagcaactcttctatggctgccctgatagcccaatcggaaaacaaccagactgatcaggatcttggcgacaacagcaggaacttggtggggagaggatcatcccccagagggtccctgtctccgaggtcgcctgtgtcctcacttcaaattcgctacgatcaacctggctag

SEQ ID NO: 31360 - DNA, 924 bp, synthetic construct
  source 1..924: mol_type = other DNA; note = Synthetic coding sequence
atgcaatctctgaccctcgacctactcgggccttctgaacttctgttggctctcaatatggggaacacatcctttaacgaagttatggaggcccagcttccatcccatggaggccctaagccctccgccgagtcagatatgggaactcggagagactatattatggcgaaatacgtggagcatagattcgctcggaggtgcaccccagagcctcagcgcctctggactgccatttgtaatagggatctcctgtcagtgctggaggctttcgcgaatgggcaggacttcggacagcccttgccaggccctgatgcacaggctcccgaggaacttgtgttacacttggctgttaaagtggcgaaccaggcatctttacccctggttgactttattatccagaatgggggtcacctggacgccaaggcagctgacggcaacacagcgctgcattatgctgctctgtacaaccagcctgattgcctgaagctactgctgaagggtcgcgctcttgtaggaacagtaaacgaggcgggagagactgctcttgatattgcccgaaaaaagcaccataaagagtgtgaggagctgctggaacaggcccaagccggaaccttcgcctttccgctccacgtggactactcttgggtgatctcaacagaaccgggtagcgacagcgaagaggacgaggaagagaagagatgtcttctcaaactgcccgcacaagcacattgggcgtccggaaggctcgatatttccaataaaacatacgagaccgtggcgagcctcggggcagcgactccccagggggagagcgaggactgccctcccccactgccagtcaagaacagtagccggactctggttcaaggttgcgccaggcatgctagtggagggaggcgagaagaaagagccaggagagagtag

SEQ ID NO: 31361 - DNA, 1497 bp, synthetic construct
  source 1..1497: mol_type = other DNA; note = Synthetic coding sequence
atgagttcgtgtgtctcttcacagccttcttcaaatcgcgctgctccgcaggatgagcttggtggacggggtagttcgtcctccgagagccaaaagccctgcgaagccctacgaggtctcagttccttgtcgattcatctggggatggagtcatttattgtggtgaccgagtgcgaacctgggtgcgcagttgacctcgggttagctcgggaccgtccgctggaggctgacggtcaggaagttcccctggatacatcgggaagtcaggctagacctcatctatccggcagaaagctgtcgctgcaggaacgctcccagggtggactggcagccggaggaagcctcgatatgaacggcaggtgcatatgcccgagtctcccttactcacctgtgtctagcccgcagagttctcctcgactacccaggcggcctactgtcgaatctcatcatgtttcaatcactggtatgcaggactgtgtccagcttaaccagtacaccttgaaagatgagattggcaaaggcagttacggcgtggtgaagctcgcttacaatgaaaatgacaatacctattacgcgatgaaggtgctttcaaagaagaagctgataaggcaggccggattcccacgacggcctcctccgcgtggcactcggcctgcccctggaggatgcatacagcctcgagggcctattgaacaggtctaccaggagattgctatactcaaaaaactggatcacccaaacgtggtcaagctggtggaggtgctggacgacccaaatgaagatcatctgtatatggtatttgagctcgtcaaccaaggacctgtgatggaagttccaacactcaaaccgctcagcgaagaccaggccagattttattttcaggaccttattaagggaatagagtaccttcactaccagaagattattcatagagatatcaagcctagcaatctgctggttggtgaggatggtcacatcaagattgcagatttcggagtctctaacgagtttaaaggctccgatgctctcctgagcaacaccgtcggcacccctgccttcatggcgcctgaatcactctcagagacaagaaaaattttctctggaaaggctctggacgtatgggccatgggcgtgacattgtattgtttcgtgttcgggcaatgtcccttcatggacgagcgcatcatgtgcctccattccaagattaaatcacaggcactggaattcccagatcagcctgacatagccgaggacctgaaagatctgattactagaatgcttgataagaaccctgagtctagaattgtcgtcccagagatcaaaatcctggtaaagactatgattcgaaagaggtcattcggaaacccctttgagggcagcaggagagaagaaagaagcctcagtgccccaggcaatctgttgacaaaacagggatccgaagataatctgcagggcaccgacccgcctcccgttggcgaagaggaagttctcctttag

SEQ ID NO: 31362 - DNA, 600 bp, synthetic construct
  source 1..600: mol_type = other DNA; note = Synthetic coding sequence
atgaccccgctggcgccttgggatccaaagtacgaagctaaagccggtccacgcccagtctggggtgctaattgcagctccggcgcttctttctccggacgaacattatgccacccgagcttttggcccctgtatgaggcggcttccggtcgaggactccgtcccgtagctccagccacagggcattggaacggacaacaagcaccacccgacgctggtttcccagtggtatgctgtgaagacgttttcttgagtgatcctctcttgccacggggacagcgagtgcccctatacttgtccaaagctccacagcagatgatgggaagcctcaaactcctcccccctccacctatcatgagcgcccgtgtcctgcctagaccgtcgccttccagggggccaagcactgcgtggttgtctggacccgagttgatcgccctcaccggactcctgcagatgtctcaaggcgaaccacggcctagctcctctgcagttggtccccctgatcacaccagcgaccctccttctccttgtggttcacccagctctagccagggtgccgacctgagtttgcctcagacacccgacacacactgtccctag

SEQ ID NO: 31363 - DNA, 1248 bp, synthetic construct
  source 1..1248: mol_type = other DNA; note = Synthetic coding sequence
atgtggcggaaggtctacacacccagatctagttttgagctatccgcgcagcctccgtcatgggaacagcgtaagctgctggaaaaatgcgcaatgactgccctatcttccaagctgattagtcagcaaaaggcttttttcgccaagatggtggtggatgcggtgatgatgctggacgacctgctgcagttaaaaatgattgggattaaaaaagttcagggtggagctttggaagacagccagcttgtcgctggtgtcgctttcaaaaagacattttcctacgcaggctttgaaatgcaacctaagaagtatcataatccaaagattgcgctgctgaacgttgagttggaactgaaggctgaaaaagataacgcggagatcagggtgcatacagtcgaggactatcaggctattgtcgatgccgaatggaacattctctatgacaagctggagaagattcaccactctggcgctaaagtcgtcttgagcaagctgcccattggtgatgtggccacccaatactttgccgaccgcgatatgttttgcgccggaagggtgcctgaagaggacctgaagcgaacaatgatggcctgcgggggtagcattcagacatccgtcaatgccttaagtgcggatgttctgggcaggtgccaggtgttcgaggaaactcagattggcggtgaaaggtacaactttttcacaggatgccccaaggccaagacgtgtactttcattctgcggggaggagccgaacagtttatggaggaaacggagcggagtttgcacgatgcaattatgatagtccggagggctatcaagaacgactccgtggtcgccggtggcggagctatcgagatggagctgtctaaatacctgagagactactcaaggacaatccctggtaaacaacagcttttaattggcgcatatgctaaggccctggagattatacctagacagctgtgcgacaatgccggttttgacgcgacgaacattctgaataaacttagagcaaggcacgcacaaggtggtacttggtacggtgtggacattaacaacgaggacatagccgacaacttcgaggctttcgtgtgggagcctgctatggtccgaatcaacgctcttaccgctgctagcgaagcggcttgcctcattgtaagcgtggacgagaccattaagaatccaaggagtactgtagacgcgccaactgccgctggtcgcggaagaggccgtggccgacctcactag

SEQ ID NO: 31364 - DNA, 3117 bp, synthetic construct
  source 1..3117: mol_type = other DNA; note = Synthetic coding sequence
atggtcagctctgcacaaatgggatttaacctgcaggcgctgctggagcagctgtctcaggatgaactgtcaaagtttaagtaccttatcactactttttctctcgctcacgagctgcagaagataccccataaggaagttgacaaggctgacggaaaacagctcgtggagattttaaccacacattgtgattcatattgggtggagatggcctcgctgcaggtgttcgaaaaaatgcacagaatggatctcagtgagagggcaaaagatgaggtgcgtgaggcagcccttaaatcttttaacaagaggaaacctctgtctctagccttcactgagaccaagggcaatgttatctgtctgggcaaggaagtgttcaaggggaaaaaaccagataaagataatcgctgccggtatatccttaagacgaaatttcgcgagatgtggaagtcttggccaggtgacagcaaagaagttcaagtaatggcagagaggtataaaatgctcatcccgttctctaatcctagagtcttgccgggtcccttttcctacacagtagtgctatacggcccagcaggcctgggcaaaaccacactggcacaaaagctgatgctagactgggccgaggacaatctgatccataaattcaaatatgccttttacttatcttgcagggagcttagtaggctcggcccttgttctttcgccgaactggtgttccgggattggcccgagctccaggatgacatcccacacatcctggcccaggccagaaaaatattatttgtaattgacggcttcgatgaactgggagctgcgccaggcgctcttatcgaagatatttgcggtgattgggaaaaaaaaaaaccagtgccagtgctcttagggtcactgttaaaccgcgtaatgctgcctaaagccgcattgctggtgaccactcgccctagagccttgcgggaccttaggatcctcgccgaggaaccaatctatatcagagtagagggatttttggaagaagatagaagggcttatttcctgagacatttcggcgacgaggatcaggccatgagagcattcgaacttatgagatccaacgctgcactctttcagcttgggagtgccccagccgtatgctggatcgtctgtaccacactgaagcttcagatggaaaaaggggaagaccctgtacccacctgcctgacaagaaccggcctcttcctccggttcctgtgctccagatttccccaaggggcacagcttagaggcgctctccgtactctgtccctgctcgcggctcagggactgtgggctcagacaagcgtgctccatcgggaagacctggaaaggctcggcgtgcaagagagcgacctgagactctttctggacggcgacatcttacggcaggaccgcgtgtcaaagggttgctacagctttatacacctctcctttcagcagttcctcaccgccttgttctacactctggaaaaggaagaggaagaggatagagatggacacacctgggatattggggacgtccagaagctgctctccggcgtggaacgcctcagaaatcctgacctgattcaagccggttattacagttttggcctggccaacgaaaaaagggcaaaagagctggaggcaacctttggctgtaggatgtccccggacattaaacaagaactgctaagatgcgatatctcctgcaagggcggacattcaaccgttacagatctccaggaactcttgggatgtctatacgagtctcaggaggaagagcttgttaaggaagtcatggcacagtttaaggaaattagtctccatctgaacgctgtggatgtcgtcccgtctagtttttgcgtgaagcactgccggaaccttcagaaaatgagccttcaggttataaaggagaatctgccagaaaacgtgacagcatcagagagcgatgcggaagtggaacgctcacaggatgatcaacacatgctgcctttttggacagatctctgttcaattttcggcagcaataaagaccttatgggtttggcaattaatgattctttcctcagtgccagtctggtgcggattctgtgcgaacagatcgcgtccgacacttgtcatcttcagagggtcgttttcaaaaatatctcacctgccgatgctcaccgaaacctgtgtctagccctgagaggacacaagaccgttacatacctcacgctgcaaggcaacgatcaggacgacatgttccccgctctttgtgaagtcttgagacaccctgagtgtaatcttcggtacctggggctcgtttcttgcagcgccactacacagcagtgggctgacttgtcgttggctcttgaggtgaaccagtctcttacttgtgtcaacttaagcgataatgagcttctggatgagggcgcaaagcttctctacactacactccggcacccaaaatgttttctgcaacgactttcccttgagaattgccatctgacagaggccaactgtaaagatctagcagcagttctcgtagtcagcagggagctgacccacctttgcctcgcaaaaaatcctatcggaaacaccggcgtcaagttcctatgtgaaggcctgcggtaccccgagtgcaagctgcagacgttagttttgtggaattgtgacatcacgagcgatgggtgctgtgacctcacaaaattgttacaagagaagtcttctctgctgtgccttgaccttggcttgaatcatattggagtgaaaggaatgaaatttctgtgtgaagctttacgcaagcctctttgcaatctcaggtgtctgtggttatggggttgtagtattcccccatttagttgcgaagacctctgcagcgcgctgtcatgtaaccaaagccttgtaaccctcgacttggggcagaatcccctggggagcagcggcgtgaaaatgctcttcgaaacgctgacatgctcaagtgggacgcttcgcactctccgccttaagatcgatgacttcaatgatgaactgaataagctcctcgaggagatcgaggagaagaacccccaactcataatcgacaccgagaaacaccacccctgggctgagcgcccttcctcccacgacttcatgatctag

SEQ ID NO: 31365 - DNA, 1443 bp, synthetic construct
  source 1..1443: mol_type = other DNA; note = Synthetic coding sequence
atgaggcttagacgattggccttattccccggagtggctcttctactcgcagccgcacggctcgcagccgcttctgagttcttcgccccttggtgcggacactgtaaacgcctagcgcctgagtatgaggccgctgctacaaggctgaagggaatcgtgccactagccaaggtagactgcacagccaatacaaacacctgcaacaaatacggggtgtctggatatccaacattgaaaattttcagggacggcgaggaggccggagcttatgacggacctcgtactgcagatggtatcgtgagtcatctgaagaaacaggcgggtcccgcaagcgtgcccctccgaactgaggaggaatttaagaagttcatcagtgataaagatgcatctattgtaggcttttttgatgacagctttagcgaagcccactccgagttcctgaaggcggcaagtaatctgcgggacaattatcgattcgcccacacgaacgtggagagcttagtgaacgagtatgacgacaatggggaagggattattctcttcagaccctcgcatctaacaaacaagtttgaggacaagaccgttgcctacactgaacagaagatgactagtgggaaaattaagaagttcatccaagaaaacatttttgggatttgcccacatatgacagaggataacaaggacttgatacaaggaaaggatttgctgattgcctattatgatgtcgattatgagaagaacgctaaagggagtaattattggaggaacagggtgatgatggtggcaaaaaagtttctggatgccggtcacaagttaaacttcgcggtcgccagtcgaaaaacattctcccacgagttaagtgacttcggcctggaaagcacagcaggcgagatacctgtcgttgctatccgtactgctaagggtgaaaagtttgttatgcaagaagagttttcccgggacgggaaggcgttggaaagattcctccaggattatttcgacggtaacttgaagcggtacctcaagagtgaacctatccctgagagcaacgatgggcctgtgaaagttgtagtggctgagaacttcgatgaaatagtcaacaatgagaacaaggacgtcctcattgagttttacgctccctggtgtggccattgcaagaatctggaacccaaatataaggagctaggagaaaaactcagcaaagaccccaacatcgtgattgcgaagatggacgcaacggccaatgacgtgccatcaccatatgaggtgcgtgggttccctactatatattttagcccagccaataagaagcttaatcccaaaaaatacgaagggggacgggagcttagcgatttcatatcatacctgcagcgcgaggcaaccaatcctcctgtaatccaggaagagaaaccaaagaagaagaaaaaggcccaggaagatttgtag

SEQ ID NO: 31366 - DNA, 228 bp, synthetic construct
  source 1..228: mol_type = other DNA; note = Synthetic coding sequence
atgggtgtgaaactcgaaatttttcgtatgattatctacctcaccttccctgtggcgatgttctgggtgagtaaccaagcggagtggtttgaggatgatgtaattcagcggaagcgagagctgtggcctcccgaaaagctccaggaactggaggagtttaaagagagactgcgtaaacgcaaacgccgtgaagagaaattactgcgggatgcccagcagaatagctag

SEQ ID NO: 31367 - DNA, 807 bp, synthetic construct
  source 1..807: mol_type = other DNA; note = Synthetic coding sequence
atgggatccgccaagtccgtgcctgtcacccccgcaaggccccctccgcacaacaaacacctggccagagtggccgatccccgaagcccatccgctgggatcctaaggacccccattcaagtggaatcatctccacagcccggactccccgctggtgagcagctggaaggcctgaaacacgcacaggactcagacccaaggagtcccactttagggatcgccagaacgcccatgaagacaagtagcggcgaccctccaagcccacttgttaagcagctgtcagaagtgttcgagacagaggactctaaatctaacctgcccccagaacccgttttgcctccagaggctcccttatccagtgagctggatttgcccttaggtacccaattatccgtggaggagcaaatgcccccttggaatcagacagagttcccttccaagcaggttttctccaaggaggaagccaggcagcccaccgaaactcccgtggctagccagtcttcagataaaccttcaagggaccctgagacccctcgttcatcaggatcaatgagaaaccgctggaaaccaaattcctctaaggtgctcgggcgatcccccctgaccatcttgcaggatgataatagccccggtactttgactctgagacagggtaagcggcctagtcccctgagcgagaacgttagtgagctgaaggagggagccatacttggtactgggcgattgctgaaaacgggaggcagggcatgggaacaggggcaggaccatgacaaggaaaaccagcactttcccctcgttgagtcatag

SEQ ID NO: 31368 - DNA, 351 bp, synthetic construct
  source 1..351: mol_type = other DNA; note = Synthetic coding sequence
atgttacttgaatgcggtatgcaggaagaagggctgttcagagttgcacctagtgcttcgaaattaaagaaactaaaagcagccctagactgttgtgtggtcgatgtgcaagagtactctgcagatccacacgctatagccggtgcgcttaagtcctaccttcgtgagttgcctgagccactcatgactttcgagctatacgacgagtggatccaagcatcgaatgtacaggaacaggacaagaaactccaggcactgtggaacgcctgcgagaaactgcccaaggccaaccataataacattagatacctgatcaaattctatccaagctgtcagaatataaaaatgtag

SEQ ID NO: 31369 - DNA, 906 bp, synthetic construct
  source 1..906: mol_type = other DNA; note = Synthetic coding sequence
atggtcaggaccaagacgtggacgctgaaaaaacatttcgttgggtatcccaccaatagcgacttcgaactgaagactgccgaattaccccctctcaagaatggtgaagtgctcctcgaggcccttttcctgacagtagacccttatatgcgcgtggcagccaagagactgaaggagggcgatacaatgatgggacagcaggtcgcaaaggtcgtggagagcaagaacgtggccttgcccaagggtaccatcgtcctcgcttcccccggatggacaacccacagcatttccgatgggaaggacttagagaaactgctgacagagtggcctgatacaattcccctttccctggctcttggcactgtcggtatgccagggctcaccgcatattttggcttgctggagatatgcggtgtaaaaggaggggaaaccgtgatggtgaacgctgcagcaggcgcagtgggcagcgtagtgggacagattgcaaaattgaagggatgtaaagtggttggggcagtcggatctgacgagaaggtggcttatctccagaagttgggatttgatgtcgtcttcaactataaaacagtggaatcactggaagaaacactcaagaaggcaagcccggatgggtacgattgttacttcgataacgtgggaggcgaattttctaatacagtgattggccagatgaagaaattcggccgtattgccatatgcggcgcaatctcaacttacaaccggactggaccactccctcccggtccaccgcctgagatcgtcatttatcaggagttgcgtatggaggcattcgtggtgtaccggtggcagggcgatgctcgtcaaaaggctttgaaagatttactgaaatgggtgttggaaattaagcgagaaaacgaggaggactag

SEQ ID NO: 31370 - DNA, 1068 bp, synthetic construct
  source 1..1068: mol_type = other DNA; note = Synthetic coding sequence
atgctgggctcagggtttaaggccgaaagactcagggtgaaccttcggttggtcatcaacagactgaaactcctcgagaagaagaagacagagctggctcaaaaagccaggaaggagatagccgattacctagccgctggaaaagatgagcgtgcacgcatcagggtcgaacatatcatcagagaggactacttagtggaagccatggagatcctggagctttattgtgatctactccttgccaggttcggactaattcagagtatgaaagaacttgactcagggttggccgaaagcgttagtaccctggctgaactgaaaatagtagcagaccaattgtgcgctaagtactctaaagagtatggcaaactctgtaggactaatcagatcggcactgtcaatgacaggctcatgcataagttaagcgtggaggcccctcctaagattcttgtggagcggtacctgatcgaaattgctaagaattacaatgtgccgtatgaacccgactctgtggttatggccgaggctccaccgggagttgagacagacctaatcgacgttgggttcacggacgatgtgaagaaagggggacctggacggggaggctccggaggtttcacagcgccagttggcggaccagatggaaccgtgcccatgcccatgccgatgcccatgcccatgccctctgctaatacacctttcagctaccccctacctaagggacccagcgatttcaacggtctgcccatgggcacgtatcaggccttccctaacattcatcctcctcagatccccgctacccccccatcctatgagtctgtggatgacattaatgctgacaagaatatttcgtcagcccaaatagtggggccaggcccaaagcccgaagcaagcgccaagctcccaagcaggccggctgacaactacgacaattttgtgctgcctgagctcccatccgtgcccgataccctgcccactgcctctgctggggcaagcactagcgcttctgaagacatcgatttcgatgacctctccagacgcttcgaagaactgaaaaagaaaacatag

SEQ ID NO: 31371 - DNA, 2175 bp, synthetic construct
  source 1..2175: mol_type = other DNA; note = Synthetic coding sequence
atgcagatgaccatacaagccctgcaggatgaattacgcatccagagagaccttaatcagctctttcagcaagacagctcctcgcgaaccggcgagccatgtgtcgccgaactgaccgaggagaacttccagagactgcacgcggagcatgagcgtcaagcaaaggagctcttccttttacgtaaaacactggaggaaatggagctcaggatagaaacccagaaacagactttaaacgctagagatgagagcatcaagaaacttttggagatgctacagagcaaaggactgtctgccaaagctaccgaggaagaccatgagcggacaaggagactggctgaagccgaaatgcacgtccatcacctggaatcccttctagaacagaaggagaaagaaaactcaatgctgcgcgaggaaatgcaccgtcggtttgaaaacgctccagattccgccaagactaaggccctgcagacagttattgaaatgaaagactctaaaatttcatccatggaaaggggactgcgcgacttagaggaggagatccagatgctaaaatctaacggtgccctctccacggaggagcgcgaggaggaaatgaaacaaatggaagtgtatcgtagccacagcaagttcatgaagaataagatcggtcaagttaagcaagagttatcccggaaggatacagagcttcttgccctacagaccaaactggaaaccttgactaatcagttttcagactctaaacagcacattgaagtgctaaaagagtctttgaccgccaaagagcagcgggctgctattctacaaaccgaagtggatgccttaagactgcgtttggaggagaaggagactatgcttaacaagaagacaaaacaaatccaggatatggccgaagagaagggcactcaggccggtgagatccacgatctgaaagatatgctggacgtaaaagaaaggaaggtgaacgttctgcagaagaagatcgaaaatctgcaagagcagctacgagacaaagaaaaacagatgtccagtctgaaggagagagttaaaagcctgcaggctgacaccaccaacactgacacggcccttaccactctggaagaagccctcgccgagaaggaacgaactatagagagactcaaagagcagagagacagggacgaaagggagaaacaagaggagatcgacaactataaaaaagaccttaaggacctgaaagagaaggttagccttcttcagggggatctaagcgaaaaggaagccagtctgctggatcttaaggagcatgccagtagcctcgccagctcagggctcaagaaggactcacgccttaagacacttgaaatcgcgctcgaacagaaaaaggaagagtgccttaagatggaatcccagctgaagaaagcacacgaagccgctctcgaagcacgcgcatcccccgaaatgtcagaccgtattcagcatctagaacgggaaatcacgagatacaaggacgagtcgtccaaagcacaggccgaggtggatcgcctgctcgagattctgaaagaggtcgaaaacgagaaaaatgacaaagacaagaagatcgcagagttggaatcactgacctcgagacaggtcaaagatcagaacaagaaggtcgctaacctgaagcacaaggaacaggttgagaaaaaaaaatccgcgcagatgctggaggaggctcgaagaagggaagacaatcttaatgactcatcccagcagctccaggtggaagaactgctcatggctatggagaaggttaaacaggaattggagagcatgaaagcaaaattaagttcgactcagcagtctttggcggaaaaagagacacacctgaccaatttacgggcagagcgtcgaaaacacctggaggaagtgttagagatgaagcaggaagctttactggccgcaattagcgagaaggacgctaacattgctctgttagaactatcctcttctaagaaaaagactcaggaagaagtggccgcactgaaacgcgagaaggatcggttggtacagcagttgaaacagcagacgcagaacagaatgaagctgatggccgataattatgaagatgatcacttcaaaagcagccactccaaccagactaatcataaacctagccctgaccaggatgaggaagagggcatttgggcctag

SEQ ID NO: 31372 - DNA, 408 bp, synthetic construct
  source 1..408: mol_type = other DNA; note = Synthetic coding sequence
atggccattggttttaatgtggagacagtaacctataagaacctgaagtttcaggtgtgggacctgggcggacagacgtctataaggccttactggcgatgttactatagtaacaccgacgccgtcatttacgtagtggattcctgtgacagagaccgcatcgggatttctaagagtgaactggtcgcaatgctggaagaagaagaactcaggaaggctatcctggtggtgttcgccaacaagcaggacatggaacaggctatgaccagtagcgaaatggctaatagcctaggtctccccgctttgaaagatagaaaatggcagatctttaagacatccgcaactaagggcacaggcctggatgaagccatggagtggttagtcgagaccctgaagagcaggcagtag

SEQ ID NO: 31373 - DNA, 684 bp, synthetic construct
  source 1..684: mol_type = other DNA; note = Synthetic coding sequence
cgacgacagatcctgaaggagctggcactgtgcttgcgcaggcaggagatgtatggacccagggcagctagccgcaacaaagagacatctgctggtcctgtcgcagtgatgggtaaagactattacaagatcttaggcatccccagtggcgctaacgaggacgaaatcaagaaggcttatcggaagatggcattgaagtaccacccagacaagaataaggagcccaacgcggaggaaaagttcaaggagatcgcagaagcctacgatgtgcttagcgatcccaaaaagcgaggcctttatgaccagtacggggaggagggccttaagactggaggagggaccagcggcggttcctcaggaagcttccactacacattccatggcgacccccacgctacctttgccagcttctttggcggatccaacccttttgacattttctttgcatctagtagaagtactagacccttttcaggtttcgatcccgacgatatggatgtggatgaggatgaagacccctttggcgcattcggtagattcggtttcaatggtttatcgcgagggcctcggcgtgcaccagagccactctacccgagacgcaaagttcaggatccccctgtggtgcacgaactgagggtctctctcgaggagatctaccatggatccactaaacgcatgaagtag

SEQ ID NO: 31374 - DNA, 252 bp, synthetic construct
  source 1..252: mol_type = other DNA; note = Synthetic coding sequence
atgtccatgctgaagccctccggtctgaaggcaccgactaagattctaaagcctggcagcactgcactgaagacccccacggctgtcgtggctcctgtggagaaaacgattagctctgagaaagcctcatccacccccagcagcgaaacccaggaagagtttgtagatgacttccgggtcggagagagagtgtgggtgaacggaaacaagcctggttttatccagttcctcggcgaaacccagttcgcatag

SEQ ID NO: 31375 - DNA, 642 bp, synthetic construct
  source 1..642: mol_type = other DNA; note = Synthetic coding sequence
atggacatgctcggtggcccaggcattgagtcacaatgccgaaaggtggatataattgcagacgcagcttacagcatctttcagaagccaaagagtttcaccgggaattttgtaattgatgagaacattctgaaagaagagggtatcgaaaatttcgacgtttacgctatcaagcctggacatcctttacaacctgatttctttctggacgaatatccagaggcggtgtcgaaaaaggtggagagtaccggcgcagtgcccgagtttaaagaagaaaagctgcagctccagcctaaaccgagaagtggcgcagttgaggagactttcagaattgtgaaggacagtctgtctgatgatgtggtcaaagccacccaggccatatatctgtttgagctgtcaggggaagacgggggaacatggtttctggacctaaagagtaaggggggtaatgtgggctatggagaaccttctgaccaggccgatgtcgtgatgagtatgaccaccgatgacttcgtgaaaatgtttagcggaaaactgaagccgaccatggcctttatgtcaggtaagctgaaaattaaaggtaacatggccctggcaatcaaactcgagaaactgatgaatcagatgaacgcccgactgtag

SEQ ID NO: 31376 - DNA, 1230 bp, synthetic construct
  source 1..1230: mol_type = other DNA; note = Synthetic coding sequence
atgaacagaacctggccccgtcggatctggggctcatctcaggacgagcctgaattcgcaagctccgtgagacggcctcacctgacttccgacgctgtcgctctcctgagagacaatgttacgccaagggagaacgagttgtggacatccctaggtgacagctggaccagacccggtcttgaactgtccccagaagagggacctccctatcgtcccgagttcttcagtggatgggaaccgcctgttaccgacccccagtcccgggcatgggaagatccggtggaaaagcagctgcagcacgagcggagaagacgccaggtgactcaagctacgcagcaagggcgaggatgggaagtgcggggaagaggtaggtccgcttggccacggttgactaggctgagttacttcctgcagcagtcagccccacaggtcgcagttaacggtcaccgagacctcgagcccgaaagcgagccccagctggaaagcgagactgcaggtaaatgggtgctgtgtaactacgactttcaggctcgtaactcaagcgagctatccgtcaagcaacgtgacgttctggaggttctcgacgattcaagaaagtggtggaaggtgcgggatcccgcaggccaggaagggtacgtgccctataacattttgactccctatcccggacccaggctgcatcactcgcagagtccagccagaagcctaaacagcacaccccctccccctcctgctcccgctccagcgccaccgccagcactagccagacctcgttgggacaggcctaggtgggatagctgcgattcacttaacgggctcgatccctccgagaaagagaaattctcacagatgctgattgtaaacgaggagctgcaggccaggctggcccagggcaggtccggaccgagtcgagcggtccctggaccaagagcccctgaacctcagctgtccccaggcagcgatgccagtgaggtcagggcatggctgcaggccaagggcttctcatcaggaaccgtcgacgcactgggtgtgttgaccggcgctcaactattctccttgcaaaaggaagagttacgcgctgtgtcccctgaggagggtgcgagagtgtacagtcaggtcactgtgcagagatcccttctggaggacaaagagaaggtcagtgagttggaagccgtgatggaaaaacaaaagaaaaaagtggagggggaggtcgaaatggaagttatttag

SEQ ID NO: 31377 - DNA, 1425 bp, synthetic construct
  source 1..1425: mol_type = other DNA; note = Synthetic coding sequence
atggcttctctgagtcgcgcactccgagttgcagccgcacaccccagacagtcccctaccagggggatggggccatgcaatttgtctagcgccgctgggccaactgcggagaagtccgtcccttaccagcgtactttaaaggaaggacagggaaccagtgtggtggcccagggaccctcccggcctttgccttcaactgcaaacgtagtggtgatcgggggtgggtcgctgggctgtcagactctctaccacctcgccaagttaggaatgtctggtgccgtcctgctcgaaagggagcgtttgacctctggcacaacatggcacaccgctgggctgctgtggcagctcaggccaagcgatgtagaggtcgagttattagcacacacaaggcgagtagtgagcagagaactggaagaggagaccggcctgcacacagggtggatacagaatggtgggctgtttatcgcttctaatcgccagcgcctggacgagtataagcggctcatgagtctcggaaaggcctatggcgtggagagccatgttttatcacccgcagaaaccaagactctatacccactcatgaacgtggacgacctttatgggactctgtatgttcctcacgatggcaccatggatcccgctgggacctgcactactctcgcaagagctgcctctgctagaggagcccaggtaatcgagaattgccctgtcacaggcatacgggtgtggacagatgactttggcgttcgcagagtggccggagtggagacacagcatggctctatacagaccccttgtgtcgtcaactgtgcgggagtatgggcttcggctgttggaagaatggcgggagtcaaagtgccgctggtcgctatgcaccatgcctatgtggtcaccgaacgcattgaaggcatccagaatatgccaaacgtgagagatcatgatgcctctgtgtacctaaggctccagggcgacgccctgagtgtgggagggtatgaagcaaatcccatcttctgggaagaagtgtccgataaattcgcatttgggctgtttgatcttgactgggaagtatttactcagcacatcgaaggggcaataaaccgtgtccctgtgttagagaagaccggcattaaaagcacggtgtgcggcccagaatcattcactccagatcataaaccacttatgggggaggctcccgaactgagaggcttctttcttgggtgcggcttcaatagcgcgggaatgatgcttggcggaggttgtggacaggagttagcccactggatcattcacggcagaccggaaaaagatatgcacggatatgatatccgcaggttccatcattccctcacagaccaccctaggtggattagggagagaagccacgaatcctaccaggagctcctgcgacgtcttccgccacgctag

SEQ ID NO: 31378 - DNA, 1893 bp, synthetic construct
  source 1..1893: mol_type = other DNA; note = Synthetic coding sequence
atgtccatagaattgcagtcggtgtccaatcctgtccaccgcaaagacctagtgattcgtctgaccgatgacacggaccccttcttcctctacaaccttgtgatctcggaggaggacttccagtctttaaagtttcagcagggcctcctggtagacttcctggccttcccgcagaaatttatcgacctcctgcagcaatgtacacaagagcacgctaaagagatccctaggttcctgctccaactcgtgagtcccgctgcgatcctggataattctcctgcctttttaaacgtggtggaaaccaatccattcaaacatcttacgcatctgtcgctcaaacttcttcccggaaatgacgtggaaatcaaaaagttcctggccggatgtcttaaatgttccaaggaggagaagctctccctgatgcagtcgctcgacgacgcaaccaagcagctggactttacccggaagactttagcagagaaaaagcaggaactggacaagcttcgcaacgagtgggcaagccacaccgctgccttgaccaataagcatagccaggagttgacaaatgaaaaggaaaaggccttgcaggcccaggtacagtatcagcagcagcatgagcagcagaagaaagatctggaaatcctccaccagcagaatatacatcagcttcagaacagactctccgagcttgaagctgccaataaagacctcaccgagaggaagtacaagggagatagcacaattagagagctaaaggctaagctgagcggggtggaggaagagctgcaacgaacaaagcaagaagtcctgtctctgcggagggaaaactcaacgctggacgttgagtgccacgagaaagagaagcatgtgaaccagctgcagactaaggtggccgttctcgagcaagagattaaggataaagaccagctcgtgcttcgaactaaggaggcgtttgacactattcaggaacaaaaagttgtgttggaagaaaacggagagaaaaatcaggtgcaactcgggaagctggaagcaaccattaaaagcttgagcgccgagttactaaaagctaacgaaattattaaaaaactccagggagatctaaaaacactgatgggtaaactgaagctcaagaacaccgtgacaattcagcaggaaaagttgcttgcggagaaggaggaaaagctccagaaggaacagaaggagctccaagatgtcggccagagccttaggattaaagagcaggaggtgtgtaaacttcaggagcagctggaggcaactgtcaagaaattagaggagtctaagcagttacttaagaacaatgagaaactgatcacctggcttaacaaggagttgaacgaaaaccaactggttcgcaagcaggacgtgctgggaccttcaacaacccccccagcacacagcagttcgaatacaataaggagcgggatttctcccaacctaaacgtggtcgacggcaggctaacttatccaacgtgcggcataggttatccagttagctccgcctttgcttttcagaatacgttcccacactccatttctgccaagaatactagccaccccggaagtggaaccaaagtacaattcaaccttcagtttaccaaaccaaacgcaagcctgggggatgtgcagagtggcgcaaccatatcaatgccctgttccaccgataaggaaaacggcgaaaatgtgggattggaatccaagtacctgaaaaaaagggaggattctattcctttgaggggtctgtcacagaatctattttctaactcggatcatcagcgcgatggaacactgggggcattgcatactagttcaaaacccaccgccctgcccagcgcttcaagtgcttattttcctgggcagctgccaaactcctag

SEQ ID NO: 31379 - DNA, 1170 bp, synthetic construct
  source 1..1170: mol_type = other DNA; note = Synthetic coding sequence
atggaccgagaaacgctcatcgacgtggccagaacttcgctgcgaactaaggtgcacgctgaactggccgatgtcctcacggaggcagtcgtcgacagcatactggcaattaagaagcaggacgaaccaattgacctctttatgatcgagataatggagatgaagcacaagtcagaaacagatacatctctgattagaggactcgtgctagatcatggagctcgccatccagatatgaagaaacgggttgaagatgcctatatcttgacatgcaatgttagtttggagtatgaaaagacggaggtgaattccggatttttttataagtccgctgaagaaagggagaagttggtaaaggctgaacggaagttcattgaggatcgcgtcaagaaaataatcgagctgaagcgaaaggtatgtggagattctgacaaaggctttgtcgtcattaaccagaaggggatcgatcctttttccttggacgcgctgagcaaggaagggatcgtggctctgcgcagagccaaacggcgaaacatggaacgcctaactctggcttgcggaggagtggccctcaacagcttcgacgacctctccccggattgcttggggcacgcagggctggtgtacgaatataccctcggggaggaaaaatttacattcattgagaaatgtaataaccccagaagtgtgaccctattaatcaagggcccaaataaacacacgttgactcagatcaaggatgccgttcgcgacggattgcgtgccgtgaaaaatgccattgacgacggctgcgtcgtgccaggagccggtgctgtcgaagtggctatggccgaagcactcataaaacataagccttcggttaagggcagagcacagctgggcgttcaggcctttgccgacgctttacttattatcccgaaagtgctggcccagaatagtgggttcgacctgcaggagactttggtgaagattcaggccgagcacagtgagagtggccaattggtgggcgtggacctgaatacgggagagccaatggtggctgctgaggtaggtgtgtgggacaattactgtgtgaagaagcagcttctccacagctgcactgtcatcgccacaaacatcctgctcgtagatgagatcatgcgcgctgggatgagctctttgaaaggctag

SEQ ID NO: 31380 - DNA, 441 bp, synthetic construct
  source 1..441: mol_type = other DNA; note = Synthetic coding sequence
atgacagtgaacgaggccaaggaaaagctgaaggaggcccctgagggaacgttcttaatccgtgattcctcacactcagactacctcctgacaatctccgtgaagaccagtgccggacccaccaatctaagaatcgagtaccaagatgggaagtttaggttagactcaatcatttgtgtgaaatctaagctcaaacaattcgattccgtggtccacctgattgactattatgtacagatgtgcaaagataagcgtaccggacctgaggctcctcgcaacggaaccgtccacctgtacctcactaaaccgctttatacctcagcaccctccctccagcacttgtgtaggctgaccatcaacaagtgcacaggcgcaatatggggattacctcttccaactaggctgaaagattatctggaagagtataaattccaggtctag

SEQ ID NO: 31381 - DNA, 1905 bp, synthetic construct
  source 1..1905: mol_type = other DNA; note = Synthetic coding sequence
atgcttgaatacgccctgaagcaagaacgggctaaatatcacaaactgaaattcggaactgacttaaaccaaggcgagaagaaggcagacgtttctgaacaggtgtcaaatgggccagtagagtctgtcacattggagaattctcccttagtgtggaaagagggtaggcaattgctacgccagtatcttgaagaggtggggtacaccgataccattttggatatgagatctaagcgggtgagaagcctccttggacgttccctggagctgaatggtgctgtcgagccttcggaaggagcccctcgggctccccctggccctgcaggcctatcggggggtgaatccctcctcgtcaaacagatcgaggagcagatcaagcgcaacgccgctggcaaagacggtaaggaacgcctgggcggatctgtcctgggacagatcccattcctccaaaactgcgaggatgaagattctgacgaggatgatgaactcgacagtgtccagcataaaaaacagagggttaaactaccctccaaggctctggtgccggagatggaggacgaggatgaagaagacgattcggaggacgccatcaatgagtttgacttcttagggtcaggggaagacggagaaggcgctcccgacccaaggagatgtaccgtggacggctcgccgcatgagctcgaaagccgcagagtgaaattgcaggggatcctcgctgatttgagagacgtggatgggctgcctcccaaagtcacagggcctcccccaggcaccccgcaacccagaccccacgaggacgttttcattatggacacaattggaggtggagaagttagcttgggcgacttggccgacctgacagtcaccaacgacaacgatctgagttgtgatctgagtgatagcaaggatgcatttaagaagacttggaatcctaaatttactttgagatctcattatgacggaattaggtcattagccttccaccattctcagtctgcactgctgaccgcctcagaggacgggactctcaaactgtggaatctgcaaaaggcagtgaccgccaagaagaatgcggcactcgatgtggagcctatacacgcatttcgcgcacaccgtggcccagtgctggctgtagccatggggtctaacagcgagtattgctactcaggaggagccgatgcctgcatacactcctggaagatcccagacctgtccatggatccatacgacggttatgatccttcagtgctgagtcacgttttggagggtcacggcgatgccgtttggggcctggccttcagccctacatcacagcgactggctagttgcagtgcggatggcaccgtgagaatctgggacccttctagtagctctccagcttgtctgtgcacctttccaactgcatcagaacacggagtgcccacctcagtggcgttcacgagtacagagcctgcacatatcgtggcttcttttcgcagtggagatacagtgttgtacgacatggaagtgggttctgctttattgactttagagagtcggggatcctctggacccacacaaattaatcaggtagtctcccaccctaaccagcctctgaccatcactgcccatgacgaccggggtatccggttcctcgacaaccggacaggaaagcctgtacactccatggtggcacatctcgacgcagtgacctgtctggcagtggatccaaatggagccttcctgatgagcgggagccacgactgttccctacgactatggtccctagacaataagacatgtgtgcaagagattactgcccatcgcaaaaagcacgaagaagctattcacgcggttgcatgtcacccttcaaaagcactaatcgcttctgcaggcgctgacgcactggctaaagtcttcgtgtag

SEQ ID NO: 31382 - DNA, 1368 bp, synthetic construct
  source 1..1368: mol_type = other DNA; note = Synthetic coding sequence
atgagcagtctgggggctagcttcgtacagattaagttcgacgacctgcagttcttcgagaactgtggaggcggatcctttgggtctgtctaccgggctaaatggataagccaggacaaagaagtggccgttaaaaaactcctcaaaatagagaaagaggccgagatattgagcgtcctctcgcatcggaacattattcaattctatggggtgatcctagaacctccgaattacggaattgtgacagagtatgcatcgctgggctctttgtacgattatatcaattctaaccgttcagaggagatggacatggatcatatcatgacctgggctacagatgtggccaagggcatgcattacctgcatatggaggctccagtgaaagtgatccacagggatctcaagagcagaaatgtggtaattgcagcagacggggttttgaagatctgcgactttggtgcttcaaggtttcacaatcacaccactcacatgagcctcgtaggcacatttccatggatggcccctgaggtgatccagtcgttgcccgtcagtgagacctgcgatacctattcttacggggtggttttgtgggaaatgttgactcgggaagtgccattcaaagggctggagggactccaagtcgcctggttggtcgtggaaaagaacgaaagattgaccatcccttcttcttgccctcgcagcttcgccgaactgctgcatcagtgttgggaggctgacgcgaagaagaggccatcctttaagcagattatctccatcctggagtcaatgtccaatgatacaagcctccccgacaagtgcaatagttttcttcataacaaggccgaatggagatgtgagattgaggccaccctggagcgcttgaagaagctggaacgggacctttcattcaaagaacaagagttgaaagagcgagaacggagattgaaaatgtgggagcaaaaactgacagaacagagtaataccccactgctgttgccactagcagcccgaatgtctgaggaaagctacttcgagtccaaaacagaagagtcgaatagcgcagaaatgtcgtgccagatcacagccacaagtaacggagaaggccatggcatgaacccttccctccaagccatgatgctgatggggttcggagacatcttctcaatgaacaaggctggcgctgttatgcatagtggtatgcagattaatatgcaggctaaacaaaacagctccaagactacgtccaagaggcgaggtaagaaagtgaatatggcactggggttctctgacttcgatctttctgaaggcgacgatgatgatgacgatgacggtgaggaagaggacaacgacatggacaatagcgaatag

SEQ ID NO: 31383 - DNA, 474 bp, synthetic construct
  source 1..474: mol_type = other DNA; note = Synthetic coding sequence
atgaagagtatgagccagctggccgtacttagccgtcgatggaaaccgagcgagatgaaactggatccttttcaagaggtggtgcttgagagctctagcgtggacgaactcagagagaagctgagcgaaatctctggaatacctctggatgacattgaattcgcaaagggcagaggaacattcccctgcgatatctcagtccttgacattcatcaggatttggactggaatcccaaggtcagtactcttaacgtgtggcctctttacatttgtgacgatggggcagtgatattctaccgagataagacggaggaactaatggagctaactgatgaacagcgtaacgaattaatgaaaaaagagtcgtccaggctgcagaagactgggcaccgagtcacctatagtcctcgaaaagagaaggcgcttaagatttaccttgatggtgcccctaacaaagacctcacacaggactag

SEQ ID NO: 31384 - DNA, 1083 bp, synthetic construct
  source 1..1083: mol_type = other DNA; note = Synthetic coding sequence
atgaaggccacggcgatgacctcagcctggttagcccaagggaccggggagggcgtgaacgatgtgaggaaaggagcctgcgcatcacacgtttcgacgatggcttcattccttaagggcgcacacgtaactatcaatgccagagcggaagaggacgtagagcctgagtgcataatggagaaagtggccaaggccagcggggctaactattccttccataaagaatctggccgttttcaagacgttggtcctcaggcaccagtcggttccgtctaccagaaaaccaacgccgtgagcgaaattaagagggtcggtaaggactcgttttgggctaaggccgaaaaagaggaggaaaaccgaagactggaggagaaaaggagggcggaagaggcccagcgccagctggaacaggaaaggagagaacgcgagctgagggaggccgctcgccgagaacaaaggtatcaggagcagggaggggaagctagcccccaacggacatgggaacagcagcaagaggttgtgagccgcaatcggaatgagcaggaaagtgcagtgcatcctcgggaaatctttaaacagaaagaacgagcaatgtcaaccacaagcatctcctctcctcagccaggaaagctcagaagccccttcctgcagaagcagctcacccagcccgaaacccactttggccgagagcccgctgccgcaatttcacgccctagagctgatctccccgcagaggagccagcaccgtcaaccccaccatgtctcgtccaagctgaggaggaggccgtgtatgaggagccacctgagcaggagacattctatgagcagccacccctggtccagcagcagggtgctggaagtgagcacatcgatcatcatatacagggccaagggctgagcggtcagggtctgtgcgctagggccctgtacgattaccaggccgcagacgatacagagatctccttcgaccctgagaacctcatcaccggcatcgaagtcatcgacgagggttggtggcggggatatggcccagacggacacttcggcatgttcccggctaattacgttgagctaattgagtag

SEQ ID NO: 31385 - DNA, 291 bp, synthetic construct
  source 1..291: mol_type = other DNA; note = Synthetic coding sequence
atgtgtcatacatcgtgttcttctggctgtcaaccagcttgctgcgctccaagcccttgtcagccggcatgctgcgttccagtgtcttgtcagtcaagcgtgtgtgtacctgtctcctgccgccctatcgtgtgtgctgcaccgtcttgccagtcgtccttgtgtgtgcctgtgagctgtaggccagttgtgtacgcagctccgtcatgtcagtcctctggatgttgccagccaagttgcactagcgttctgtgtcggccaatctcatattcaatctcgtcctgctgctag

SEQ ID NO: 31386 - DNA, 27 bp, synthetic construct
  source 1..27: mol_type = other DNA; note = Synthetic coding sequence
atgcccttgtccagccccaatgcctag

SEQ ID NO: 31387 - DNA, 384 bp, synthetic construct
  source 1..384: mol_type = other DNA; note = Synthetic coding sequence
atgagttcctctatgtggtatattatgcaatccatccagagcaagtactcactttctgagcggctcattcggacaatcgccgcaatccgctcgttcccccatgacaacgtcgaggacttgatcaggggtggcgctgatgtcaactgtactcatggtacactgaagcccctccattgtgcgtgtatggtgtctgatgctgactgcgtggagctgctgctcgagaagggcgctgaagttaatgcgctggacgggtacaatcgcaccgctctgcactacgccgctgaaaaggatgaggcatgtgtcgaagtacttctggagtacggcgcaaatcccaatgctctggacggtaatagagacacccccctccactgggccgctttttag

SEQ ID NO: 31388 - DNA, 318 bp, synthetic construct
  source 1..318: mol_type = other DNA; note = Synthetic coding sequence
cagtggaccgcaagcacagctaccatcaccaaagagaagcaagaccaacctaagaaggacatcagtaactaccaggtggaacaggcccaagtgctgctcaaaagagaaaaagagatccccccaacagtcttcccgaaccggtccccctggtgtcagaacccctatgtgtccgcccatccctattgcccactcatcgaacctcacaatacctcaacggccggaggccgactggaccgccagcctcgcaccagaagtacaaggcctaaccgcgcttcgggctctaaaaagaagaagacgagtgagtcacagaagcagtag

SEQ ID NO: 31389 - DNA, 1116 bp, synthetic construct
  source 1..1116: mol_type = other DNA; note = Synthetic coding sequence
atggaagaggagggcttggccgacgaggaggtgagactggtgcagaagaaggacacaggtcatatctatgcaatgaagattctgcggaagtctgacatgttggaaaaggagcaagtcgcacatatcagggcggagcgcgatatcttagtggaggccgatggcgcttgggtcgttaaaatgttttactctttccaggataaaaggaatctctacttaattatggagttcctgcccggaggcgacatgatgaccctgcttatgaaaaaggatactctgacagaagaggagacccagttctatatctctgaaacagtccttgctatcgatgctatccatcagctggggttcatccatcgtgacatcaaacccgataatctgttattggatgccaaaggccatgttaaactgagcgacttcgggctctgcacgggccttaaaaaagcccaccggaccgaattttatagaaacttgacacacaaccccccttcggatttttcattccagaacatgaacagtaagaggaaagccgaaacatggaagaaaaacaggcggcagttggcttacagcacggtgggaacgcctgactatattgcacccgaagtcttcatgcaaactgggtataacaagctgtgtgactggtggtccctcggagtgatcatgtatgaaatgctgatagggtatccacctttttgtagcgagactcctcaggagacttatcgcaaagttatgaattggaaagagacactggtctttcctccagaagtgccgatctctgagaaagcaaaggaccttatcctgcgcttctgcatcgactcagagaatagaatcggaaattccggcgttgaagaaattaaaggccaccctttttttgagggcgtagattgggaacacatccgggagcggcctgccgcaatccctattgaaataaagtccatcgacgatacgagtaattttgacgactttcctgagagtgatattctccagccggtacctaatacaactgagcctgattacaaatcaaaggactgggtgttcttgaattacacgtacaaaaggtttgaagggcttactcaaagaggctcaatccccacatacatgaaggcgggaaagctgtag

SEQ ID NO: 31390 - DNA, 564 bp, synthetic construct
  source 1..564: mol_type = other DNA; note = Synthetic coding sequence
atgaataataccctgcgcaaagatgggaaaaaagattgctgttttgaaatcagcgccccagataaaagaatttatcagtttaccgcagcttcccccaaggacgctgaggagtgggtgcagcagctcaaatttgtgctgcaagacatggagagcgacattattccagaggattacgacgagagaggcgaactgtatgatgacgttgatcatcccctgcctattagcaaccctttgacttcctcacagcctatcgacgacgagatctatgaggagttacccgaggaggaggaggacagcgctcctgtgaaggttgaagagcagaggaagatgagccaggacagcgttcatcacacctccggggacaagagcacagattatgctaacttttaccaaggtctttgggactgcacgggtgctttctctgacgagctttctttcaaacggggagatgttatctacattctgagtaaagagtacaatagatatggatggtgggtaggtgagatgaaaggagctattggcttggtgcctaaggcctacatcatggaaatgtacgacatctag

SEQ ID NO: 31391 - DNA, 219 bp, synthetic construct
  source 1..219: mol_type = other DNA; note = Synthetic coding sequence
atggcactgtctttgggctggaaagcccacagaaaccactgcgggctgctcctccaggcactgaggagctcaggcctgcttctgttcccatgcggccaatgtccctggcgaggcgcagggagctttctcgaccccgagataaaggctttcctggaagaaaatactgaagtgacttctagtggctccttaacacctgagatccagttgcggctgctgtag

SEQ ID NO: 31392 - DNA, 2919 bp, synthetic construct
  source 1..2919: mol_type = other DNA; note = Synthetic coding sequence
atggctgctgccgctgcggagcagcagcagttttatctgctgcttggtaatctactgtctcctgacaatgtggtcaggaaacaagcggaggagacctatgagaatatccccggtcagagcaaaattacattccttctgcaagccatacgcaacactaccgctgcggaggaggctcggcagatggccgctgtactgttgcgtcggctcttatcctcagcgttcgatgaagtataccccgcattgcccagtgacgtccagactgccataaagaacttgctgccaggcttcctgcaagctgtcaacgactcttgttaccagaatgatgacagcgttttgaagtccttagtcgagatcgccgacacggtgccgaagtacctacgcccacatctggaggcaactcttcagttgagcttgaaactgtgcggtgatacgagtctcaacaacatgcagaggcaattagccctagaggtgatcgtgacattgtctgaaacagccgcagctatgctcaggaaacatacaaatattgttgcacagacaatacctcagatgttagcaatgatggtggacttggaagaggacgaggattgggcaaatgctgatgagctggaagacgatgactttgattccaacgctgttgccggagaatccgcccttgatcgcatggcatgcggcctgggaggaaaactggtgctcccaatgatcaaagaacacatcatgcagatgttacagaatcctgactggaaatacaggcacgctggtcttatggctctgagcgccattggagaaggatgccatcagcagatggaaggcatcctgaacgagatcgttaacttcgtgttgctgtttttacaggatccccaccctagggttcggtacgctgcgtgtaacgccgttggccagatggcgacggattttgcgccaggatttcaaaagaaatttcatgaaaaggtgattgctgctctgcttcaaactatggaagaccagggaaatcagcgcgtccaagcccacgccgcagctgccttaatcaacttcaccgaagattgccccaagtcactgctcattccctatctcgacaacctggtgaagcacctgcattccatcatggtgctcaagctccaggaactgatccaaaaaggtaccaagctggtgcttgagcaagtggtgacatccatcgccagcgtggccgatacagcagaggaaaaatttgtaccttactatgacctattcatgccctcactgaaacacatagtggagaacgcagtccagaaggagctgcgcctcctgagaggtaagaccatagagtgcatctccttaattgggttggccgtgggaaaggagaaattcatgcaggacgcctcggacgtcatgcagttgttgctgaaaactcaaacggatttcaatgacatggaagacgatgatccccagatttcatatatgatctctgcctgggccagaatgtgtaagattctcggtaaggagttccagcagtacttgccagttgttatgggcccactgatgaagacagccagtattaaacctgaggtggccttactggatacccaggacatggaaaacatgtccgacgatgatggttgggaatttgtcaatctgggagaccagcagagctttggcattaagacggcaggtctggaggaaaagtctacagcctgccaaatgcttgtctgctatgcaaaggagctcaaagaaggcttcgtggaatacactgagcaggtagtcaaattaatggtgccactcctgaaattttacttccacgatggagtgcgagtcgccgctgccgagagcatgcccctgttgctagagtgcgctagagtccgtggccctgaatatttgactcagatgtggcattttatgtgcgatgcgcttattaaagcaattggaaccgagccagacagcgatgtgttgtctgaaatcatgcatagctttgcaaagtgtattgaggtcatgggtgacgggtgcctaaacaatgagcacttcgaggaactgggcggtatacttaaagccaaactggaggaacactttaagaatcaagaattgcggcaggtgaagcgccaagatgaagattatgatgagcaggtagaagagtcattacaggatgaggatgacaacgacgtgtacatcctgacgaaagtgagcgatatccttcacagcatatttagctcctataaggaaaaagtgctgccatggtttgagcagctgttacctctcattgttaacctaatttgtccccataggccgtggcccgatcgccagtggggattgtgtatattcgatgatgtgattgagcattgctcgccagcctctttcaaatacgcggagtactttctaaggcccatgctccaatacgtgtgcgataacagcccagaggtccggcaggccgctgcctatggtctcggcgtgatggcccagtacgggggtgacaattatagacctttctgcacagaggccctgcccctgctcgtgagggtgatccagtccgccgattctaaaaccaaggagaatgttaatgctacagagaactgtatatctgccgtaggtaaaattatgaaatttaagcccgactgtgtgaatgtggaggaggtgctaccacactggctgtcttggctgccgttgcacgaagataaagaggaagcagtgcagacatttaattacttgtgtgatctcattgagagcaatcaccctattgtgctgggccctaacaacaccaacctgccaaagatcttttcaatcattgctgagggagagatgcatgaagctatcaagcatgaggatccatgcgccaagcgcctggcgaacgtggtcaggcaggtgcagacctcaggcggactatggacggagtgcatcgcccagctctcacctgagcaacaggcagccattcaggaactcctgaactctgcatag

SEQ ID NO: 31393 - DNA, 1428 bp, synthetic construct
  source 1..1428: mol_type = other DNA; note = Synthetic coding sequence
atgcaggtcacctttatatatgtgtgtttgaagggcctcatgcttcaagatttagttagcgccaaattaatatccgattatacagtcactgagatccctgacactattaacgacctacaagggtctactaaggtgctccaggccgtccagtggttggtctcacactgccctcattcactggacctctgctgccaaactttgattcagtatgtggaagacggcatcggacacgagttctcggggaggttcttccacgatcggcgagaacggcgactgggcggactagcatcccaggagccgggtgccatcatcgagttgttcaactctgttttgcagttcctggcttccgtcgtgtcatccgagcagttatgtgacctgagttggccagttaccgaattcgccgaggctgggggtagcaggctgttgccccacctccactggaatgccccagaacaccttgcttggctgaaacaggcagtgttgggcttccagctgcctcagatggacttgcctcccttgggtgcaccatggttgcctgtctgttctatggtcgtgcaatacgccagtcagatccctagttcacggcaaacacaacccgtgctgcagtcccaggtcgagaacctgctccatcggacctattgccgatggaaatccaagagcccatcacctgttcatggagccggtccctctgtgatggagattccgtgggacgatttaatcgctctttgtattaatcacaaattacgagactggaccccaccacgacttcctgtaacttctgaggcattgagcgaggatggtcaaatctgtgtgtactttttcaagaacgatttgaagaaatacgacgttcccctgagttgggaacaagcccgtctgcagacacagaaggagctgcagctgcgagagggacgcttggccatcaagccgtttcacccaagcgccaataactttccaattcccctgctccacatgcaccgcaactggaaacgcagcactgaatgtgcccaggaaggacgaataccttctacagaggacctcatgagaggcgcttccgctgaggagttactcgcacaatgtttgagctcaagcctcttactcgaaaaggaggagaacaaaagattcgaagatcagctccagcaatggttgagtgaggacagtggcgcttttactgacctaacatcccttcccctctacctcccccagacattagtgagtctttcacacacaatcgagcccgtcatgaagacgagtgtaaccaccagcccgcagagtgatatgatgagggaacagctgcaactttcagaggccacaggaacctgtcttggagaacggctaaagcatcttgaacggctgattcgatcatcacgggaagaggaagtcgcgtccgagctgcacctctctgctttactggacatggtggacatctag

SEQ ID NO: 31394 - DNA, 333 bp, synthetic construct
  source 1..333: mol_type = other DNA; note = Synthetic coding sequence
atgagtacggccctgacccacaccactgtcgcaatgaggtgtcccatgggtggtgggggaggtcctacctatggtccacctcagccatgggggcaccccgatgtacacattatgcaacaccacgtgctgcccatccaggcaaggctgggatccatcgctgaaattgatctaggtgttccaccacccgtcatgaagactttcaaggagttcctgctcagtctggacgactccgttgacgaaacagaggctgtgaagcgttacaacgactacaagttggacttccgccgtcagcagatgcaagacttctttctagcccataaggacgaggaatag

SEQ ID NO: 31395 - DNA, 828 bp, synthetic construct
  source 1..828: mol_type = other DNA; note = Synthetic coding sequence
atgtccgcggaagtgaaggttaccggtcagaaccaagagcaattcctcttgctggccaagagcgcaaaaggagctgcgcttgccactcttattcatcaggtgctcgaagctcccggagtatatgtgttcggcgagttacttgatatgcccaacgtaagggagcttgctgaaagcgattttgcttcgacattccgcctgttgacagtgtttgcctacggtacgtatgcagattacctggcagaagctcgcaacttgccaccgctgactgaggcccagaaaaacaagctgcggcacctatctgtggtgacactcgcggcaaaagtgaagtgtattccttacgcggttttactggaagctctggcgctgcggaatgtgcggcagctggaggatcttgtgatcgaagccgtgtacgctgatgtactgcggggttctctagaccagagaaatcaaagactcgaagtggactacagtatcggtcgcgatattcaacgtcaggatctttccgcaatcgccaggaccctgcaggagtggtgcgtcggttgcgaagtggtcctctcaggaatcgaggaacaggtcagtcgcgctaatcagcacaaagagcagcagctcgggttgaaacagcaaatcgaatctgaggttgctaaccttaagaagacaattaaggttactacagccgcagcggcagctgccacctctcaggacccagagcagcatctgacggaattacgggaaccggctcccggaacgaaccaacgacagccatctaagaaagccagtaaagggaaaggactgaggggtagcgccaagatctggtcaaagtctaactag

SEQ ID NO: 31396 - DNA, 876 bp, synthetic construct
  source 1..876: mol_type = other DNA; note = Synthetic coding sequence
atgatcggtgacggtgaggactacttcctatctttgtttggcgactcaaaaaaactgaccgcccactccaattatactcaaaagacgttgaaatactttagcatgatcttagaagaggtgggacaatttactagctcctccctcggcgatgtggaaatcgctgaagtcaacgtgaagggattgttcgtgaagctcatcaactcctcactggataaggagatggctatcggcgatcacattttgcagcagaatgtcaatggacagaccatcagcctctacagatttttacccaatattgtgatgcaggctaactccaccgtcaccgtctgggcagctgcaagcgaagccaagcatcagccaccctctgatttcctctggaaagaacaggacaaattcagagccagcccagattgtatcaccattctttgcaagccaaacggtcaggcaatcgcatggtatactccgatccattggaagcaggcttgggaaaagcttgacgccgatgtcgaattcaatagatgtagcgtggtgagtccaacattcagaaaacgcgtcttccaatggacggccagtactgctactattaccaaagaaaagcaggaccaacctaaaaaggacatcagtaactatcaggtagaacaggcacaggtactgctcaaaagggagaaggagatccccccaacagttttccctaatagaagtccatggtgtcagaatccttatgtcagtgctcatccatattgtcccctcatcgaaccacataatacctcgacagccggtggacgtcttgatcggcagcctcgcacaagatctaccaggcccaatagggcaagtggctctaagaagaaaaaaacgtctgaaagtcagaaacagtag

SEQ ID NO: 31397 - DNA, 1185 bp, synthetic construct
  source 1..1185: mol_type = other DNA; note = Synthetic coding sequence
atggtgccaagccaggcaccttatctcgttcccgctttccccctcccggctgcaactagccccggaagggaatacgctgcacctgggacggctcccgaggggctgcacgggctgcccctcagtgaggggttgcaaccctatcctgcctttccattcccatatctcgacacatttatgacagtgttccttcctgacccgccagtgtgtcccctcctaagcccctctttcctaccttgccccttcttaggagccacggctagttcagccatctcacctagtatgagttccgcaatgagtcctacacttgacccgccacctagtgtgacgtcccagcgaagggaagaggagaagtgggaggcccagagcgaaggccatccttttatcacaagtagatcctcttcacccttacagctcaacctgctgcaggaagagatgcctcggccaagcgaatcacctgatcagatgagacgcaacacctgccctcagaccgagtactgcgtcaccggtaacaacgggtcagaatcttctcctgcaaccaccggcgcactctctaccggctctccaccacgcgagaatccttctcaccccacggccagtgccctgtccaccggatccccgcctatgaagaaccctagccaccctactgcttcgactctttcaatggggctgccaccatcaaggacacccagtcatcctaccgccaccgtcttgagtacagggagtccaccatctgagtctccttcccggactggctctgcagccagcggctcctctgatagctccatatatttgacatcaagcgtttacagtagcaaaatctctcaaaacggacaacagtctcaggatgtgcagaagaaagagacgttccccaacgttgcggaggagcctatctggcggatgatccgccagaccccagagcgcattctgatgacctatcaggttccagaacgggttaaagaagtggtcttaaaggaggacttggaaaagcttgaatctatgcgtcaacagcagccccagttctcacacggccaaaaagaggaactcgcgaaagtgtataactggattcagtcccagacggtgacgcaagaaattgacatacaggcctgcgtgacctgtgaaaacgaggactccgccgacggggctgccacatcttgcggtcaagtgctggtggaagactcctgctag

SEQ ID NO: 31398 - DNA, 2424 bp, synthetic construct
  source 1..2424: mol_type = other DNA; note = Synthetic coding sequence
cagggggctagcttcgccctcgccgctgcagcagccctgctgttcgggtctgatatggaggacggcccaagcaacaatgcttcctgtttccgcagactcactgaatgctttttaagccctagtctgacagacgagaaggtgaaggcctacctgagccttcacccacaggtgctggacgaatttgtgagcgaaagtgtgagcgctgaaaccgtcgagaagtggttaaagcggaagaacaacaaatccgaggacgaaagcgccccaaaagaggtatctagataccaggataccaatatgcagggggtcgtatatgagcttaactcgtatatcgagcagaggctggacactggtggggataaccagctgctgctctacgagctcagtagcattatcaagatcgccactaaagctgacggatttgccctgtactttttaggggaatgcaataatagcctatgtatattcactccaccgggaataaaggagggaaaacctcgcctgatacctgctgggcctatcacgcaagggaccacggtgtccgcatacgtagccaagagccgaaaaaccttgctagtggaggatatcctgggcgatgagcgcttccccaggggcaccggcctggaaagcggcacaaggatccagagcgtgttgtgcctgccgatcgttactgctatcggggacctgataggcatcctggagctgtacaggcattggggtaaagaggctttctgcctgagccaccaagaggtagccactgccaacttagcctgggcatccgtcgcaattcaccaagtgcaggtgtgccgcggactggcaaagcagactgaactgaatgatttcctgctggatgtatccaagacatatttcgataatatcgtggccattgacagtttgctggagcacattatgatttatgccaaaaacctggtaaatgccgatcggtgtgctctgtttcaggtcgaccataaaaacaaggagctgtatagcgacttgtttgatatcggcgaggaaaaggaggggaaacccgtctttaaaaagactaaggagatccgatttagtattgagaaggggattgccggtcaagtagctaggacaggagaggtgctgaatatccccgatgcatacgccgacccgaggttcaacagggaggtggatttgtacacggggtatactacaagaaacatcctgtgcatgcccatagttagtcggggatctgtcatcggggtggtgcagatggtgaacaaaattagcggatccgctttttctaagacagatgagaacaatttcaagatgttcgcagtgttctgtgctttagccctgcattgtgccaacatgtaccaccggattcggcattccgagtgcatttacagggtcacgatggagaaattgagctatcatagcatctgcacgtctgaagagtggcagggacttatgcagttcaccttgcccgtccggctgtgcaaggaaattgaactgtttcatttcgatataggacctttcgaaaacatgtggcccggaatcttcgtctacatggttcatcggagctgtggcactagctgcttcgaattggagaaactatgcaggtttatcatgtcggtgaagaaaaactatcgccgagtcccctatcacaactggaaacatgccgtcaccgttgcccactgcatgtatgcgatccttcaaaataatcataccctcttcaccgaccttgagagaaaggggttgctgatcgcatgcctgtgccacgatctcgatcatcgagggttcagcaacagctatctccaaaagtttgatcaccccctcgccgcactctactccacaagcacaatggagcagcaccactttagtcagacagtgtccatccttcagctcgagggtcataacattttttccaccctcagctcctccgaatatgaacaggtgcttgaaatcatcaggaaggctatcatcgccaccgacctggccctgtatttcggcaataggaaacagctggaagaaatgtaccagacaggctccctgaatttgaacaatcagtctcatagggaccgggttatcggtctgatgatgacagcctgtgatttgtgcagcgtgaccaagctgtggcccgtcaccaaattgactgcaaacgacatctacgcggaattttgggcagagggcgacgagatgaaaaaattgggcatccagcctattccaatgatggatagagacaaaaaagatgaggtgccacagggtcagctcggcttctataacgcagtggccataccttgctacactacactgactcagatcctcccccctaccgagcctctgctcaaagcgtgccgcgacaacctttctcaatgggagaaagttataagaggtgaagagacagccacatggatctccagcccttctgtcgcacagaaagcggctgccagcgaggactag

SEQ ID NO: 31399 - DNA, 1677 bp, synthetic construct
  source 1..1677: mol_type = other DNA; note = Synthetic coding sequence
atggccagttgccccgactcagataactcttgggtgttggcgggaggagagctggggatcagccttaatatgtgtctcctgggggctcttgtcctgctcggacttggcgtcttattgttcagtggaggtctctcagagtccgaaaccgggccaatggaggaggtggagcgccaggtattgccggatcccgaggtgcttgaagcagtgggagatcgacaggacgggctgagagaacaactccaggccccagtgccaccagacagcgttcccagtttacagaacatgggcctcctgttggataagctggcaaaagaaaaccaggatatccggttgctgcaggcgcagcttcaggcacagaaggaagaactgcaatcacttatgcatcaacctaagggactggaggaagaaaacgcacagttacgaggggcactgcagcaaggagaagccttccagagagctctcgaatcagagttgcagcagcttagggctagattgcaggggctcgaggcagactgtgtgcgtggaccggacggggtgtgcctcagtggagggcgagggccacagggagacaaagctatccgcgagcagggtcccagagagcaggaaccggagctttcgttcctgaagcagaaagaacagctggaggcagaggctcaggcgctacggcaggagctggaaagacagcggcgactgctggggagcgtccagcaggacctcgagagatctttacaggacgcctcccggggagaccctgcccatgccggtctggcggaactggggcatcgattggctcaaaagctgcaggggctggaaaattggggacaagaccccggagttagtgccaacgcaagcaaggcgtggcatcaaaaatcccacttccaaaactcacgggagtggtctgggaaggaaaagtggtgggacggccagcgtgatagaaaggccgaacattggaaacataagaaagaggagagcggacgagaacgcaaaaaaaattggggcggtcaagaagacagagaaccagccggtcgatggaaagaggggagacctcgggtggaggagtccgggagcaagaaagagggaaaaagacagggtcctaaggagccgccaagaaagtccggaagtttccactcttccggcgaaaagcagaaacagcctaggtggcgggagggcacgaaggactctcacgaccccttgccctcttgggctgagttactgagacccaaatatagggctcctcaggggtgctcaggtgtcgatgagtgcgcccgacaagaaggcctgactttttttggaacagagctcgcaccagtgcgacagcaggaactggcttctctgttacgcacatacttagcacggctcccatgggctggacaattaacaaaagaactgccattgtctccagcgttctttggcgaggatggcatctttcggcacgaccggctgcggtttagagacttcgtagatgccctggaggactccctggaggaggtggccgtgcagcagacgggagacgatgacgaggttgatgactttgaggattttatcttttcacacttcttcggagataaagcactcaaaaaaagatcagggaaaaaagacaaacacagtcagtcccctagagcagcgggtccccgtgagggccactcccacagccatcatcatcatcacagagggtag

SEQ ID NO: 31400 - DNA, 1881 bp, synthetic construct
  source 1..1881: mol_type = other DNA; note = Synthetic coding sequence
atgggcaacgcggctggcagcgctgaacagcctgctgggccagctgcccctccacctaagcaacatcgctttgaaaaattaatggaatatttcaggaacgaggattctaacatagatttcatggttgcctgcatgcagttcattaacatcgtcgtgcattctgtcgaaaacatgaattttcgggtctttctgcagtacgagttcactcatctgggtttagatttgtacctggaacggctccgtttaaccgagtccgacaaactccaggtccaaattcaggcctacctggataatatattcgatgtcggcgctctgctcgaagataccgagacaaagaacgctgtgctggagcatatggaggaactgcaagaacaggtcgccttactgactgaaaggctacgggacgctgaaaacgaatctatggccaagattgccgagcttgagaaacagctgtcccaagcgcgaaaggaacttgaaaccctaagggagcgctttagtgaatccacggcaatgggaccatctcgcagacccccagagcccgagaaagcccctccagcagcaccaacaaggcctagtgccctcgagctcaaggtggaagaactggaggagaaggggctgattcggatcctcaggggcccaggcgacgcagtgagcatcgaaatccttccggtggccgtagctactcccagtggaggagatgctcctactcccggtgtgccgactggttctccttccccagatctcgcccctgccgctgagccagcacctggggcagctccccctccccctccccctcctccgggaggtccaccagatgccttaggacgtcgcgacagcgaactggggcctggagttaaagctaagaaacctatccagacaaagttccggatgcctctcctgaattgggtagccctcaagccatcccagataacaggaactgttttcaccgaattaaacgatgagaaagtgcttcaagaacttgatatgagcgacttcgaagaacaatttaaaactaaatcacaagggccttctctggacctctctgcccttaagagcaaagctgctcagaaagccccaagcaaggctacattgatcgaagcgaatcgcgctaagaatcttgcaattacacttcggaagggtaatctgggagccgagagaatctgccaggctatcgaggcctacgatctgcaggccttgggccttgattttctggaactgctgatgcggtttctgccaacggagtacgagcgatcacttattaccagattcgagagagagcagcggcctatggaagaactcagtgaggaagatcgcttcatgctctgtttctctcgcatccccagactccccgagagaatgaccacgttaacgtttcttggaaactttccagatactgcacagctgttgatgccgcaattgaacgcgattatcgctgcctctatgtcaatcaaatcaagtgacaagctgcgtcagattctcgagattgtgctggctttcgggaattacatgaatagtagtaagcggggtgccgcttatgggttccgcctacaatccctggatgcgctcctggaaatgaagtcaacagatagaaaacagactttactccactaccttgtgaaggtcatcgccgagaagtacccacagttaactgggttccactccgacctccacttcctcgacaaggccggttcggtatctctcgacagcgtgctagctgatgtgagatccttgcagagggggctggaactgacccagcgggagttcgtccggcaggatgattgtatggtgttgaaggaattccttagggccaattctccgactatggacaaactgctcgctgactcaaaaacagcgcaagccgtgccaacagggggattatag

SEQ ID NO: 31401 - DNA, 1500 bp, synthetic construct
  source 1..1500: mol_type = other DNA; note = Synthetic coding sequence
atggataagttgatcgtggacggcagaggcaaagcaacaatcagcaacgacggcgcaaccattctgaaactcctggatgttgtccacccagctgccaagacattggtagacattgctaagagccaggacgctgaagtcggcgacgggacaactagtgtgactttgcttgcggcagaatttcttaagcaggtaaaaccctacgttgaggaaggtctacatccacagatcattattcgcgcatttcggacggcaacccagctcgccgtgaacaaaataaaggagattgctgtaacagttaagaaagccgacaaggtcgaacagcgaaagctattagagaagtgtgctatgacagccctgtcttccaagcttatatcccaacagaaagccttctttgctaagatggtcgttgacgctgtcatgatgctggacgacctactgcaactcaagatgatcggcattaagaaggtccagggcggtgctctggaggactcacagctggtcgccggtgtggcctttaaaaagaccttctcctacgccggattcgagatgcagccgaagaaatatcacaatcccaagatcgctctgttgaacgtggaactggagctgaaagcggagaaagacaatgcggagataagggtgcacaccgtggaggactaccaggcgattgtggacgccgagtggaatatcctttacgataagctcgaaaagatccatcactctggagctaaagtcgtgctgagcaagctgcctatcggtgatgtcgcaactcagtactttgccgatagagatatgttttgtgccggaagggtacctgaagaggacctgaagcgcaccatgatggcttgcggcggatctattcagacgagcgtaaatgcgctatcagccgatgtgctggggcgttgccaggtatttgaagaaactcagattgggggtgagcggtacaacttcttcactggttgccccaaggcgaaaacctgcacctttatcctgcgcggaggagcagagcaattcatggaagagaccgagaggtccctgcatgacgccattatgatcgtgcgacgcgcaataaagaatgacagcgtcgtggccggaggaggcgctattgagatggagctctctaagtaccttcgggactatagtcggacaatccctggcaaacagcagcttctaattggagcctacgccaaagcactggagatcatcccgcgacaactgtgcgacaacgcaggattcgatgcaactaacatacttaataaactgcgagccaggcacgctcagggcggtacctggtacggcgtcgatattaacaatgaggatatcgcagacaattttgaggcattcgtttgggaacctgcaatggtgcgcataaacgcgttgacagcagcatcagaagctgcttgtctcatcgtgagcgttgacgaaaccataaaaaacccccgtagtaccgtggatgctccaacagctgccggtcggggtcgcggtagaggaagaccccactag

SEQ ID NO: 31402 - DNA, 78 bp, synthetic construct
  source 1..78: mol_type = other DNA; note = Synthetic coding sequence
atggctcacgaaatgatcggtactcagatcgtgactgaacggttggtggcactgctggaatcgggcactgagaagtag

SEQ ID NO: 31403 - DNA, 633 bp, synthetic construct
  source 1..633: mol_type = other DNA; note = Synthetic coding sequence
atggaaaagaccgaactgatccaaaaagccgtagcttacaagaatgtggtgggcggacggagatccgcatggagagtaatctcatcaatcgagcagaagaccgacacgtccgacaaaaaactccagcttattaaggactatcgggagaaggtcgagtctgagttgcggtctatttgcacgactgttctagagttgctcgacaagtaccttatcgcaaatgcaaccaatcccgagtccaaggttttttacctgaaaatgaagggcgattactttagatatctcgctgaagtcgcatgcggcgatgaccgtaaacagaccatcgataacagccagggagcctatcaggaagccttcgacatcagcaagaaggagatgcagccgacccaccccattaggctcggattggcactgaatttctcagtcttttattacgagattctgaataatcccgagctggcgtgtaccttggcgaagactgctttcgacgaagctattgccgaactagacacactgaatgaggactcttacaaagattctacattgatcatgcaactgctgcgcgataacttgacattatggaccagcgatagcgccggtgaggaatgcgatgccgcagaaggagccgaaaattag

SEQ ID NO: 31404 - DNA, 501 bp, synthetic construct
  source 1..501: mol_type = other DNA; note = Synthetic coding sequence
atggatctgatgccttttatcaacaaagcaggatgcgagtgcctcaatgagtcagacgaacacggattcgacaattgtctgcgaaaggatactacatttctggagagtgactgtgatgaacagctcctgatcactgttgctttcaaccaaccagtcaagctctacagcatgaagtttcagggccctgataacggccaggggcctaagtatgtcaagatcttcatcaatctgcccaggagtatggatttcgaagaagcggagcggtctgagcccacgcaggctctggaactcacagaagacgacatcaaggaggatgggatagtgccgctccggtatgtcaagttccagaacgttaacagcgtgacaattttcgttcagtctaatcagggcgaggaggaaacgacacgcatttcctattttacctttattggcactccagtgcaggcaaccaacatgaatgattttaagagggtggtaggcaagaagggcgagagccattag

SEQ ID NO: 31405 - DNA, 639 bp, synthetic construct
  source 1..639: mol_type = other DNA; note = Synthetic coding sequence
atggccgctccagaagaaagggacttaacccaagagcagacagagaaactcttgcagtttcaggacctgacaggaatcgagtcaatggatcagtgccgacacaccctggaacagcacaactggaacatagaggcagctgtccaggataggttgaatgagcaggaaggagtaccatctgtatttaatcccccacctagccgacccctgcaggtgaataccgccgatcacaggatttatagctatgttgtgtcacgcccacaaccgcgaggcctcctggggtggggttactatctcattatgctgcctttccgctttacttattatacaatactcgatattttccgcttcgcactgcgctttattaggcctgatccgaggtctagagtcacagatcccgtcggggacatcgtgtccttcatgcactcattcgaggaaaagtatggcagggctcaccccgtgttctaccagggcacctatagccaggctctgaatgacgctaaacgggaacttcggttcttgttggtgtatctgcacggcgatgatcatcaggatagtgatgaattttgtaggaacaccctgtgtgcccctgaggtcatttccctcattaatacttcttctcacagtttccttcttctttag

SEQ ID NO: 31406 - DNA, 1371 bp, synthetic construct
  source 1..1371: mol_type = other DNA; note = Synthetic coding sequence
atggcggattcgttggaaagcactccactgccttccccggaggaccgcctggccaagcttcacccctcaaaggagctgcttgagtactatcagaaaaagatggctgagtgcgaagcagagaatgaggatctcctgaaaaagttggagctctataaagaagcgtgtgaaggacagcacaagctggagtgtgacctgcaacagcgagaagaggaaattgcagagctgcagaaggccctcagtgacatgcaggtctgcctctttcaggagcgtgaacacgtgcttcgtctgtactcagagaacgaccggttgcgcatcagagagctggaagataagaaaaaaatccagaacctgcttgcgttggtcgggacagatgcaggagaggtgacttatttctgcaaggagcccccacataaggttaccatcttacagaagaccattcaggcagtaggggaatgtgaacagtccgagtccagtgctttcaaagctgaccccaagatctccaaacgcagaccaagtagggaacgtaaggaaagctcagagcactaccagagggacatacagacgctgattctccaagtggaggcactccaagcccagctgggcgagcagactaaactgagcagagagcaaatagaaggattgatcgaagataggcgaatacacctagaggaaatccaggtgcaacatcaaagaaaccagaataagattaaggaactcacgaagaatctgcatcacacgcaggagctactgtacgagagtaccaaagattttctgcagctcaggtctgaaaaccagaataaagagaagagctggatgctcgaaaaggacaatctgatgtctaagataaaacagtacagagttcaatgtaaaaagaaagaggacaaaatcgggaaggtgctgcctgtgatgcatgaatcccaccacgctcagtctgaatacatcaagagtttgaaggataagctcgtgcaggagaaaaagctgtcaaacatgtaccaagagcagtgtattagcctcgaggaggagttggcgcgtatccgggaagaagaggggatgaggagggagatattcaaagatagaaccaataaaatgggaaaaaggctgcagattatgactaaacgctatgaggcactggagcggaggagaatcctggaggtggaggggtttaaaacggacattaaagtcctgcgacagaaactgaaggatcttgaacagatgctgtacaaggccaccgtgaacgcgcgagccaaccaggaccttgcgctgctgtgtgaagttcgggattcaaaccgccgagcccacaaaattcaaggagagctgaagaacctgaaatcaaaagtttttggcctagagaatgaattgcggctttgttag

SEQ ID NO: 31407 - DNA, 183 bp, synthetic construct
  source 1..183: mol_type = other DNA; note = Synthetic coding sequence
atggacgaacaggccctgctggggctgaacccaaacgctgattccgacttcaggcaacgcgcactggcttacttcgagcagctgaagatctctcccgacgcgtggcaggtgtgcgcagaagccctcgctcagcgcacctatagcgatgatcacgtaaagtttttctgttttcaggtgctttag

SEQ ID NO: 31408 - DNA, 339 bp, synthetic construct
  source 1..339: mol_type = other DNA; note = Synthetic coding sequence
atgtctagctcaatgtggtacattatgcaatctatccaaagcaagtattctttgtcggagaggttgattagaaccattgcggctatcagatcatttccccatgataacgttgaagatctgattcggggaggtgctgatgtgaattgtacacacggtaccctaaaaccccttcattgcgcatgtatggtgtcagacgctgactgcgtcgaactgctgttggaaaaaggggcagaggtcaacgcactggatggatataatcgcaccgctctccactacgctgcagagaaagatgaggcttgtgtcgaggtcttgcttgaatacggggctaatcccaattag

SEQ ID NO: 31409 - DNA, 1173 bp, synthetic construct
  source 1..1173: mol_type = other DNA; note = Synthetic coding sequence
atgtccgccgcaaaccctgagacccccaacagcactatttcaagagaggcttcaacacagagcagcagcgctgcagcttctcagggctgggtgctgcccgagggaaagattgtccctaacaccgtgttcgttggcggaattgatgccagaatggacgaaacagaaattggtagttgcttcggaaggtatggttctgtgaaggaagtgaaaatcataacaaatagaactggggtatctaaagggtacggttttgtctcttttgtgaacgatgtggacgttcagaaaatagtgggctcacagatccacttccatggtaagaagcttaaactgggaccagccatccggaagcaaaagctttgcgctagacatgtccagcccaggcctttggtagttaaccccccacccccaccacagttccagaatgtgtggaggaatcctaacaccgagacctatctgcagccccagatcacccccaaccctgtgacgcagcatgtgcaggcctactctgcttacccgcatagtccgggacaggtaatcacgggatgtcagctcctagtctataactatcaggagtatccgacatatcccgactccgcattccaggtgaccaccgggtatcagctccctgtctacaactaccagccttttcccgcatacccacgtagcccattccaagttactgccggatatcaactgcctgtatacaactatcaggctttccccgcataccctaacagtccatttcaggtagctaccgggtaccagtttccggtttacaactatcagcccttccctgcgtatccttcaagccctttccaggtcaccgccggatatcagttacctgtgtataactaccaagcctttccagcttacccaaattcacccttccaggtcgccaccggctaccagttccccgtatacaattatcaagcattcccagcttatccaaactcaccagttcaggtgactaccggctaccaactgcccgtctacaattaccaggcatttcccgcatacccgaactctgccgttcaggttactacaggataccagttccacgtctataactatcagatgccgcctcagtgcccagtcggagaacagcgaagaaacctttggacagaagcgtataagtggtggtatttggtgtgcctgatccagcgtcgcgactag

SEQ ID NO: 31410 - DNA, 1335 bp, synthetic construct
  source 1..1335: mol_type = other DNA; note = Synthetic coding sequence
atgagggaaattgttcacctccaggccggacagtgtggaaaccagattggagcaaaattttgggaggtaatatccgacgaacacggcatagatcccaccggcacctaccacggggattcggatttacagttagagcgcattaacgtatactataacgaggccacggggggtaactatgtgccgcgagctgtgctggtcgatttggaacccggaaccatggacagtgtccgctccggaccttttggacagatctttcgacctgacaattttgtgttcggacagagtggggcagggaataattgggcaaagggacactacacagagggcgctgaactcgtggatgccgtgctcgatgtggtcagaaaagaagccgaatcctgcgactgtcttcagggattccagctgactcacagcctgggaggtggcactgggtccggcatgggaactttgctaatcagtaagattcgcgaggagttcccagatcgaattatgaacaccttttccgtcgtccctagccccaaggtatcggacacagtggtggaaccttacaatgccaccctgagtgtgcatcagctggtagaaaataccgacgagacttattgtatcgacaacgaggctctgtacgacatctgttttcgtacactcaagttgactacccccacatatggggatctaaaccacctggtttcagccaccatgtccggggtgacaacatgtctcaggtttccaggtcaactcaacgctgacctgcgcaaactggctgtcaacatggtcccttttcccaggctgcacttctttatgcccggattcgcgcctttaacttccaggggaagtcagcagtacagggctcttacagtgcccgagctcacgcaacagatgtttgacgccaagaatatgatggccgcttgcgatcccaggcatggaagatatctgaccgtagctgccgtgtttaggggccgaatgtctatgaaggaggtcgacgagcagatgctctctgtacagagtaaaaactcatcttatttcgtcgagtggatcccgaacaatgtcaagacagccgtgtgcgacattccacccagaggtctaaagatggcagcgacattcattggtaatagtactgccatccaggagctgttcaagcgaatcagtgagcagtttacagccatgttcaggagaaaagcgttcctacactggtatactggcgaaggtatggacgaaatggaatttaccgaagcagagagcaatatgaacgatttagtgtcagaataccagcagtaccaggacgctacggctgaggaaggcgagttcgaagaggaagcggaggaggaggtggcctag

SEQ ID NO: 31411 - DNA, 495 bp, synthetic construct
  source 1..495: mol_type = other DNA; note = Synthetic coding sequence
atggtcaacagcgtagtgttcttcgacattaccgttgatggaaagccactcgggcgaatatccatcaagctgtttgcagacaagatcctcaagactgctgagaattttcgcgctctttcaacaggcgagaaagggtttcggtacaaggggagttgcttccataggatcatccctgggttcatgtgccagggcggtgacttcacacgacacaacggaactggggataagtctatatatggagagaagtttgatgacgagaacttaattcgaaagcataccggctccggaattcttagcatggccaacgcaggccctaatactaacggttcccagttcttcatctgcgcagcaaagacagagtggctggacggtaagcacgttgcttttggtaaggtgaaagagcgtgttaacattgtagaagccatggaacacttcggataccgcaattcaaaaacttccaaaaagattaccattgcagactgcgggcagttttag

SEQ ID NO: 31412 - DNA, 3252 bp, synthetic construct
  source 1..3252: mol_type = other DNA; note = Synthetic coding sequence
atgtctcagacacaggactacgaatgtcgctctcacaatgtcgacttgccagagagccgtataccagggagcaatacacgactggaatgggtcgagattatcgagcccaggactagagaaaggatgtatgccaatctagtcactggcgagtgcgtgtgggacccacccgcaggtgttagaattaaaaggacatccgagaaccagtggtgggaattattcgatccgaatacttctaggttttattattacaacgctagtacacagcgcacagtgtggcatcgaccccagggatgcgacatcatccccctagctaaactgcagacactcaaacagaacacagagtccccacgtgcctcggccgagtcaagtcctggcaggggcagctcggtgagcagagaaggctccacctcgtcatccctcgagccggaaccagacacggagaaggcacaagagctgcccgctagggcaggtcgccctgcggcattcggaaccgtgaaggaggactcgggctcctcctccccccctggcgtgttcctggagaaagattacgaaatttaccgcgactattctgccgacggacagctgctacactacagaaccagctctctgcgctggaattccggggcaaaggaacgcatgctgattaaggtagccgatagagagccttcattcctcgcagcccagggaaatggatacgctcctgacggccctccgggtgtgcggtccaggaggcccagcggcagccagcattcacctagtctccagacttttgcgcctgaagccgacgggacaattttttttcccgaaagaaggcccagtccttttttgaaacgggctgagctccccggttcgtcatctccactgctggctcagccgagaaagcccagcggcgactctcaacccagcagtcctcgctacggatacgagcctccgctatatgaagaaccgcctgttgagtaccaggcaccgatttatgatgagccccctatggacgttcagtttgaagctgggggaggctaccaggctggaagcccccagcgatctccaggccgtaaaccaaggcccttcctccagccaaacaaacagggaccgccaagcccgtgtcaacagctcgtgctgacgaagcagaagtgcccagaacgtttcctctctctggagtactcacctgccggaaaagaatacgtgagacagctcgtgtacgtggaacaggctgggtcctcaccaaaactgagagccggacctcgccacaaatacgccccaaatcctgggggtggatcctattccctgcagccctcaccctgcctactacgggaccagcgcctaggcgtgaagtcaggggactacagcacgatggaaggccctgaattgcgacactctcaacccccaacgccccttccacaggcccaggaggacgccatgtcctggagcagtcagcaggacacactctccagtactggctactccccaggcacccgcaaaagaaaatcccggaaacctagcctgtgtcaggcgacctccgctacccctaccgaggggccaggcgatctgcttgtggagcagcctttggccgaagaacaaccaccgtgtggaacttccctcgcccctgtgaagagggccgagggggaggccgagggcgcacgtggcgcagccgagccattcctggcccaggcccgtttggcctgggaagcacagcaggcacacttccatatgaagcagcgcagctcatgggactcccagcaggacggctcgggctatgagagtgacggcgcactgccactgcccatgccaggacctgtggtgagggcctttagcgaggacgaagcgctggcacagcaggagaatcggcactggcggcgtggcacatttgaaaagttaggattccctcagattcttttagaaaagtcagtgagcgttcagaccaatctggcttccccggagccatatctgcatcccagtcagtctgaggatctggcagcttgtgcgcagtttgagagcagccgtcaaagccggtctggcgtccctagcagcagctgtgtgttcccaactttcacattacgaaagccctccagcgagaccgatatcgagaactgggcatctaaacacttcaacaagcatacacaaggcttgttcagacgaaaggtatccatagccaacatgctggcttggtccagcgagtctatcaaaaaacccatgatagtgactagtgaccgccacgtgaaaaaagaggcatgcgagttgtttaagctgattcaaatgtatatgggggatcggagggcaaaagccgatcccttgcacgtggctctcgaagtggccactaaagggtggtccgttcagggactccgcgacgaattatacatacagctgtgtcggcagacaacagagaattttcggttggagagtctggctcgcggttgggaactgatggctatctgcctggcgttcttcccgccaacccctaaatttcattcctatttggaaggatacatttaccgccatatggaccccgttaacgacaccaaaggggtggcaataagtacctacgccaagtactgctaccacaagctacagaaggctgctttgaccggggctaaaaaaggccttaagaagcctaacgtcgaggaaattcgccacgcaaagaatgccgtcttcagcccaagcatgttcggcagtgctctgcaggaagtgatgggcatgcaacgagaacgatatccggagcgacagctgccttgggttcagacccgcctcagtgaggaggtgctggccctgaatggtgaccaaacggagggcattttccgtgtgccaggagacatcgacgaagtgaacgctctgaaactccaggtggaccagtggaaagtcccaacagggctcgaagatccacatgtccctgccagcctgttgaagctctggtaccgcgaactggaagagcccctcatccctcatgaattttacgagcaatgcatcgcccactatgactcccctgaagctgctgttgcagtggtccacgcgctgccacgaatcaataggatggtcctctgctatttaattagatttttacaggtcttcgtacagcccgctaatgtggctgtgacgaagatggacgtcagcaacttggcaatggtgatggctcccaattgtctcaggtgtcagagcgacgatcccagagtgatctttgagaacacccgaaaagagatgtcctttctgcgggtgctgatccagcacttagatacctccttcatggaaggggttctgtag

SEQ ID NO: 31413 - DNA, 1503 bp, synthetic construct
  source 1..1503: mol_type = other DNA; note = Synthetic coding sequence
atggccgcagtgaagaccctaaatcccaaagggacaatgaagatgctcgtcagcggggctggcgatattaagctcaccaaagatggtaatgtgctgctacacgagatgcagatccagcatcctaccgctagtctaatcgctaaagtcgctacagctcaggacgacatcaccggagacggaacaacctcaaacgtcctaattataggcgaattgttgaaacaagcagacctttacattagtgagggcctgcacccacgtataattactgaggggtttgaagcagcaaaagagaaagcgctccagtttctcgaggaggtgaaggtgagtcgggagatggatcgagaaacactgatcgacgtggcccgtacatccttaagaacaaaggtgcacgcagagttggccgatgtattaacagaagcggtcgtggattccatacttgcgatcaagaagcaagacgagccaattgacctgtttatgatcgaaatcatggagatgaagcataagagcgagacagacacatctctgattcgaggactcgttcttgaccacggggcacgccatccagacatgaagaaaagagtcgaggatgcctatatactcacctgcaatgtgagtttggagtacgagaagactgaggtcaattctggcttcttctataaatcagcagaagagcgggagaaactggttaaggcagaacgcaaatttattgaggatcgagtaaagaagattatagagttgaagcgcaaagtgtgtggggacagtgataaaggatttgtggtgataaaccagaagggcattgatcctttctctctggatgctctgtctaaagaggggatagtggcactccgcagagcaaaacgcaggaatatggagaggcttaccctcgcatgtggcggagtggcacttaacagctttgacgacctctctccagactgcctgggacatgctggtctcgtgtatgagtacacattgggagaagagaagtttaccttcatcgaaaaatgtaacaatccaagatcagtgacactgctgataaagggccctaataaacacacactaacacagattaaagacgctgtccgcgacggtctcagggcagtgaagaatgccattgacgacggctgtgttgttccaggagccggagctgtggaagtcgctatggcagaggctctcataaaacacaagccctccgtcaagggtcgggcacagctgggagtccaggccttcgccgatgctctgttaatcatccccaaagtgctagcccagaactctgggttcgatctgcaagagaccctggtgaagatccaagccgaacactcggaaagtggccagctagtcggagtcgacctgaacactggagaacccatggtagcggcagaagttggcgtttgggataactactgcgtgaagaaacagctgcttcactcatgtacagtgatcgcaacaaatatccttcttgtcgatgagatcatgcgagcagggatgtctagcctgaaggggtag

SEQ ID NO: 31414 - DNA, 1542 bp, synthetic construct
  source 1..1542: mol_type = other DNA; note = Synthetic coding sequence
atgtgggacgtgtgcatggaacggggacaccgcgacttggagcagttcgaaagggttcatagatacatttccgaccagctgttcaccaatttcaaagagagaacagagcgcttggtgatttcaccactcaatcagttactgtccatgtttacaggtccccataagctcgtgcagaaacgcttcgacaagttgttagatttttacaactgtaccgagagggctgagaaactgaaggacaagaagacattggaggagttgcaaagtgccaggaataattatgaagccttgaatgctcagctgctggacgagctgccaaaatttcatcaatacgctcaggggcttttcaccaactgcgtacacggatatgcagaggcccactgcgattttgtacatcaagctctggagcagctgaaaccattgctaagtctgttgaaagtcgccggtcgggaaggcaatcttatcgctattttccacgaggagcattctcgggtactccagcagctccaggtgttcaccttttttccggaatctttacctgctacaaagaaacccttcgaacgcaagaccattgaccggcagtcagctagaaagccgctgcttggcctcccttcttacatgttgcagtccgaggagctgagggccagtctgctggcgaggtatcctcccgagaagctgttccaggcagaaagaaattttaatgccgctcaggacctggacgttagcctgttggagggtgatctggtgggcgtgatcaagaagaaggaccccatgggatctcagaaccgctggctaattgataatggcgtaaccaaaggcttcgtgtattcttccttcctcaagccctacaatcccaggagaagccattccgatgctagcgttggctcccatagttccacggaatccgagcacggctcctctagtccacggttccccaggcagaactccgggtctacacttacttttaatccgagttctatggcagtgtcttttactagcggatcatgccaaaagcagccccaggacgctagccctccaccaaaagagtgtgaccaaggcaccctgtcagcctcactgaacccttccaacagtgaaagttctccttctaggtgcccgtctgaccccgatagcacatcccaaccgagatctggggattccgcggacgtagcgagagatgtgaagcagcctacggcgacgccccgttcctacagaaactttcgccatccagaaatcgtcggctactctgttccgggtcggaacgggcagtcccaggacctggtgaaaggctgcgccagaactgctcaggcgcctgaagatcgcagtacggagcccgatggaagtgaagcggaaggcaaccaggtgtacttcgccgtatatacatttaaggcacgaaatcctaacgaactctcggtctcagcaaaccagaagctcaaaattcttgagtttaaggacgtgaccggtaacactgagtggtggctggcagaggtgaatggcaaaaaaggctatgtgcctagcaactacattagaaagaccgagtatacctag

SEQ ID NO: 31415 - DNA, 153 bp, synthetic construct
  source 1..153: mol_type = other DNA; note = Synthetic coding sequence
atgatgcaaaatgtgcatcttgcaccagaaacagacgaggatgacctttactcaggatacaatgattacaatcctatttacgatattgaagaacttgaaaatgacgcagcttttcagcaagccgtgcgtacttcccacggcaggaggccttag

SEQ ID NO: 31416 - DNA, 4317 bp, synthetic construct
  source 1..4317: mol_type = other DNA; note = Synthetic coding sequence
atgagcatgttgaaaccaagcggcctgaaggcaccgacaaaaattctgaagcccggaagcaccgccctgaagacgcccactgcagttgtcgcgcctgtggagaagactatttcgtctgaaaaagcttccagcaccccctctagcgagacacaggaggaatttgtggacgattttagagtgggggaacgcgtgtgggtcaacgggaacaagcctggcttcatccaattcctgggcgaaacacagttcgcacctggacaatgggccggtattgtgctggacgagcccattggcaagaacgacggtagtgtggcaggcgtacggtactttcagtgcgaacctctcaagggtatttttacgcggccttcaaagctcacccgcaaagtgcaagcagaagacgaggcgaacggattacagacgactcccgcttcgagagctacttctccactgtgcacaagcaccgcttctatggtgagctcttcccccagcacaccgtcgaatatccctcagaagccttcccagcctgcggctaaggaacccagtgctactccccctatttccaatctgacaaaaaccgcatctgagagcatctcgaatctgtcagaagcaggtagcattaaaaagggcgagcgcgagttgaagatcggagatcgcgtgttggtgggcggtaccaaagctggagttgttagatttctgggtgaaacagactttgccaaaggagagtggtgcggggttgagctggacgagcccctggggaagaatgacggcgctgtggccggaactcgctattttcagtgtcagcctaaatatggcttgttcgcacctgtgcacaaagtaaccaagattgggtttccttcaactaccccagccaaagccaaggcgaatgcggtaagaagggtgatggccactacctctgcaagcctgaagcggtcaccctcggccagttcattgtcctctatgtccagtgtggccagtagcgtgtcgagtcggccaagccggaccggcctgctgacagaaacctctagcagatatgcccgaaaaatttctggtactaccgccctgcaggaagccctgaaagagaagcagcagcacatagagcagcttctcgcggagcgggacctggagcgggctgaggtggcaaaggctacttctcatgtcggagaaatcgaacaggaactggcgctggcacgggatgggcatgatcaacatgtactggagctggaggctaaaatggatcagttgaggaccatggttgaagctgcggatcgcgagaaggttgagctgttgaaccagctagaggaagaaaagcgtaaggtcgaggatctgcagttccgggtcgaagaggagagcatcacgaaaggtgacctggagcaaaaatcacagatctccgaggatccagaaaacactcagaccaagttggagcacgcacgcataaaagaactcgagcagtctcttctcttcgagaaaacgaaggccgataagcttcaacgggagctcgaagacactcgggttgcgaccgtgtcagagaaatccagaattatggagcttgaaaaggaccttgccttaagagttcaggaggtcgccgaactgcgtcgcaggttagaaagtaacaagcccgcaggagatgtagatatgtctttgtcattgttgcaggagatctctagcctgcaagaaaagctggaagtgaccaggacagatcaccaacgggaaatcacgagcctgaaggaacactttggagcgagggaggaaacgcatcagaaggaaatcaaggcgctgtatacagccaccgagaaactgagtaaggaaaatgaatccctgaaaagtaaattggagcacgctaacaaggaaaactctgacgttatcgcattgtggaagagcaagttagaaacagccattgcaagccatcagcaggcaatggaggagctgaaagtgagcttctcaaaaggcctgggcactgagactgctgagttcgccgagttaaaaacacaaattgaaaagatgagactggattatcaacacgaaatagagaacctgcaaaatcagcaggattcagagcgtgcggctcacgcaaaagagatggaggctttgagggctaagctcatgaaagttattaaggaaaaggagaattcccttgaagctatacgtagtaagttggataaggcggaggaccagcacctggtcgaaatggaggatacactcaacaagctgcaggaagccgagataaaagtgaaagagctcgaggttcttcaggctaaatgtaacgaacaaactaaggttattgacaactttacgagccaattaaaagccaccgaagagaaactgctggacttggacgcactccgcaaggcctcttcagagggaaagtctgaaatgaagaaactgcggcagcagcttgaggccgctgagaagcaaatcaagcacttggagatcgaaaagaatgcggagtccagtaaggctagttcaattactagagagctacaaggacgagagttgaagttaaccaacctgcaggagaatcttagtgaggttagccaggtaaaggaaaccctggaaaaagaactgcaaatcctgaaggagaaattcgcggaagcttctgaggaggcggtgagcgtccagagatcaatgcaggaaacggtgaacaaattacatcagaaggaggaacagttcaacatgctcagcagtgatctggaaaagctgagagagaacctggcagatatggaggctaagttccgagagaaggacgaaagggaagagcagttgattaaagcaaaagagaaacttgagaacgacatcgccgagatcatgaagatgagcggtgacaacagcagccagctgacaaagatgaatgacgagttgaggctgaaggagagggacgtggaggagctgcaactgaaactgactaaagcaaacgaaaacgcttccttcctgcagaagagtattgaagatatgaccgtgaaggccgaacaaagtcagcaggaggctgcaaaaaaacatgaagaagagaaaaaggagctcgaaaggaaattaagtgacctggagaaaaaaatggaaacatcgcacaaccagtgccaggagctcaaggctcgatacgagagagccacctctgagactaagaccaaacacgaggaaattttgcaaaacctacaaaagaccctgctagacactgaagacaaacttaagggcgctagagaagaaaattccggcctcctgcaagaattggaggaattgagaaaacaggccgataaagcgaaggcggctcagacagctgaggatgctatgcagatcatggagcagatgaccaaagaaaaaaccgaaacactggctagcctggaggataccaagcagactaatgctaagctgcaaaacgagctggacacactgaaggaaaataatttgaagaacgtggaggagctcaataagtctaaggagctgctaaccgtggagaatcaaaaaatggaggaattcaggaaggaaatagagaccttgaagcaggccgcagcccagaagtctcaacaactttccgctctccaggaggagaacgtgaaactggccgaggagcttggtagatccagagacgaggtgactagccaccagaagctcgaagaggaacgctcggtgctcaataaccagctccttgaaatgaaaaagcgcgagagcaagtttattaaagatgcagacgaagaaaaggcctctctacagaagtcaatctccataacgtcagctcttttaacggagaaggacgccgagctggaaaagctaaggaacgaggtaacagtactgcgaggggagaacgcttctgccaagtcgcttcactcggttgtccagacacttgaaagtgataaagtgaagctggaactgaaggtcaaaaatttggaactgcaactcaaggaaaataagcgacaattgtcttcaagcagcggcaacacggatacacaggccgatgaggatgagcgagctcaggagtcccaaatagatttcctgaactctgtgatcgtcgaccttcagcgaaaaaaccaagacctgaagatgaaagtggagatgatgagtgaagccgcactgaacggcaacggagacgacctgaacaactacgattctgatgatcaagagaaacagagtaagaaaaaacctcgactgttctgtgacatctgcgactgtttcgacttgcatgacaccgaagactgccctacacaggctcagatgagcgaggatccaccacacagtacccatcatggatctagaggcgaggaacgaccttattgtgagatttgtgaaatgtttgggcactgggctacgaactgcaacgatgacgagacattctag

SEQ ID NO: 31417 - DNA, 636 bp, synthetic construct
  source 1..636: mol_type = other DNA; note = Synthetic coding sequence
atggctttcgctgactcacatctgtggaagctgctggatcgccacgctaatacaattcgccttttcgttctgctccccgagcagtccccggtatcttatagtaaacggacagcctaccaaaaggccggtggggattctggtaatgtggatgacgattgtgaacgcgtgaaaggacccgtgggaagccttaagtctgtcgaagccattcttgaggaaagtaccgaaaagttaaaaagcttatccttacaacagcagcaggatggtgacaacggagactcgagtaaaagcacagaaacctccgatttcgagaatattgagagtcccctgaatgagcgcgactcctccgcttctgttgataatcgtgagttggagcagcacatacaaacctccgatcctgagaatttccagtcggaagagagatctgacagtgatgtgaataacgatcggagcacaagttcggtggactccgacattctgagctcatcccactcatcagacaccctttgtaatgctgacaatgcccagatcccattagctaacggccttgatagccattcaatcaccagttcccggaggacgaaagctaatcgggaaaaaaggaacatgggttacagtcggcgtcgcctctggaactag

SEQ ID NO: 31418 - DNA, 2136 bp, synthetic construct
  source 1..2136: mol_type = other DNA; note = Synthetic coding sequence
atgttagcttctttgaaagttaagaagcaagagcttgctaattcctccgatgctacgctgcccgacagacccttgagcccacccttgactgctccacccactatgaaatcttcagaattctttgagatgctcgagaagatgcagggcatcaagctggaggagcagaagcccggaccgcagaagaacaaagatgattacatcccttacccgtcaatagatgaggtggtggagaagggtggcccatacccgcaggtcatcctaccccagttcgggggttattggattgaggaccctgagaacgtcgggactccaacatccctgggatcaagtatttgcgaggaggaggaggaagacaacctctcacccaatacattcggctataagcttgaatgcaagggggaagctagggcctaccggcgtcacttcctcggaaaggatcatttaaatttctattgcacaggtagttctttgggcaacctgattttgtccgttaagtgcgaagaggccgaaggcatcgagtacctgcgtgtaatactgaggtcaaaactgaaaactgttcatgaaaggatccccctggccggtctttctaagctgccttcagtcccacagatcgccaaggccttctgtgacgatgcggtggggctacgctttaatcccgttctctaccccaaggcctcacaaatgatcgtgagctatgatgagcacgaggtgaacaataccttcaagttcggcgttatttaccaaaaggcacgacagacattggaggaggaactcttcggcaataacgaagaaagtccagcgtttaaagagttcctggacctcttgggtgacaccattactctccaggacttcaaagggttccggggaggacttgatgtgactcacggccagaccggggtggagtccgtgtataccactttccgcgaccgggagattatgtttcacgtatccacaaaactgccattcaccgatggagacgcccagcagctgcagcggaagcggcatatcggaaacgacatagtggccatcatctttcaggaagagaacacacctttcgttccagacatgatagccagcaatttcctgcacgcatacattgtagtccaggtcgaaacccccggaacagaaactccctcatacaaggtctccgtaactgctcgcgaagacgtgcccacctttggtccccctttaccgtctccgcctgttttccaaaagggcccagaattccgggagttccttttgacgaaactgactaatgctgagaacgcttgttgtaaatcggacaaatttgccaaattggaggatagaaccagggcagccctgcttgacaacctccacgatgaactgcatgctcacacacaggctatgctgggactgggtcctgaagaggacaaattcgagaacggtgggcacggcggatttttagaatctttcaagagagctatcagagtgcggagtcattctatggaaactatggtgggcggacagaagaagtcccactcaggcggaattcctggctctctgtccgggggaatctcccacaatagcatggaggttaccaagactacctttagtccccctgttgtagcagccaccgttaagaatcagtctagaagccctattaagcggagatccggtctgtttcctaggcttcacacaggctccgaagggcagggagactcccgcgctaggtgtgactccactagctctactcccaaaacacccgatggaggccactcctcccaggagattaagagcgaaacctcctccaacccctcatcccccgaaatctgccctaacaaggagaaaccatttatgaagcttaaagaaaatggcagagctatttcgcgatcatctagttcaaccagctccgtcagcagcaccgccggagagggcgaagcaatggaggagggtgattcgggcggatcccagccgagcactacatccccattcaagcaggaggtgttcgtctatagccccagtccttctagcgagtctccatccctcggagccgcagcaacaccaattataatgtccaggagtccaaccgatgccaagtcccgtaattctcccaggagtaatctgaaattccgttttgacaaactcagccatgcctcgtccggtgcaggccactag

SEQ ID NO: 31419 - DNA, 1089 bp, synthetic construct
  source 1..1089: mol_type = other DNA; note = Synthetic coding sequence
atggacggcttggatgatgttgagaacagtatgctttattacaaccaggcagtgatcttatatcatttgcgccaatacacagaggcaataagtgtcggagaaaagctgtatcagtttatcgaaccattcgaggagaaattcgcacaggccgtctgtttcttgcttgtagacctttatatcctgacctaccaagccgagaaggcgctacacctcctggccgtgcttgaaaaaatgatttcccaggggaacaataataagaatggtaagaatgagactggcaacaataataacaaagatgggagcaaccacaaggcggagagtggcgcactgattgaggctgccaaatcgaaaattcaccagtataaggtccgagcctacattcagatgaaatctcttaaagcttgcaagcgggagatcaaatccgttatgaatacagctggtaactctgctcccagtctgtttctgaagtctaattttgagtacctgagagggaattaccgcaaagctgtgaagctcctgaatagcagcaacatagccgaacatccgggattcatgaaaacaggcgaatgcctccgttgcatgttttggaacaatctcggttgcatacacttcgccatgagcaagcacaacttgggaattttttacttcaagaaggcgttacaggagaacgacaatgtgtgtgcccagctgtccgccggaagtactgatcccggtaaaaaattttcgggcaggcccatgtgcacactccttacgaataaacgctacgaactcctgtacaactgtggaatccaactgcttcatatcgggagaccgcttgctgctttcgagtgtctcatcgaagctgtgcaggtatatcatgcgaacccgaggctgtggctacggcttgccgaatgttgcatcgccgctaacaaaggaacttccgagcaggaaacaaagggacttccgtccaagaagggcattgtgcaaagcattgtcgggcaggggtaccacaggaaaattgtcctggcctcccaatctatccagaatacagtgtataatgatgggcagagcagtgccattccggtagctaaggccggaaaatggggctag

SEQ ID NO: 31420 - DNA, 1821 bp, synthetic construct
  source 1..1821: mol_type = other DNA; note = Synthetic coding sequence
atgtgtggagcagggtttgggcacttcgagtggttggctggtggtggggcaggccaggacgtgggcaggagttgcattttagtcagtatcgcaggtaaaaacgtcatgctggattgtggaatgcacatgggtttcaacgacgacagacgcttcccagactttagctacattacgcagaacggaagactgacagatttcctggactgtgtgattataagccatttccacctggaccattgcggcgctcttccatacttttccgagatggtggggtatgacggtcctatctatatgactcaccccacgcaggcaatctgtcctatactcctagaagattacaggaagattgccgtggacaagaagggtgaggcaaacttctttacctctcagatgattaaggattgcatgaagaaggtcgtggccgtccacctgcatcagaccgtgcaagtagatgacgagctggagatcaaagcctactatgcaggacacgttctcggagccgctatgtttcagattaaggtggggtccgagtccgtcgtgtacactggagattataatatgacacccgacagacatttaggcgctgcctggattgacaagtgcaggcccaacctgctgatcactgagagcacatacgcgacaacgattcgtgacagcaagagatgccgggagcgggactttctgaaaaaagtgcacgaaaccgttgaacggggtggtaaagtcctgattcctgtattcgctctgggaagggcacaagagctgtgtattctcctggagacgttttgggaacgtatgaatctcaaggttcccatctatttctcaaccgggctgactgagaaggcgaatcactactacaagctatttatcccctggaccaaccagaagatcagaaaaacattcgtgcagaggaacatgtttgaatttaaacatattaaagctttcgacagggcatttgcagataaccccggacctatggtggtatttgcaacccccggaatgctgcatgcgggtcagtccctgcaaattttcagaaaatgggccggtaatgagaagaacatggtaattatgcctggatattgcgtgcagggcacggtgggccataagattttgtctggccaacgtaaactcgaaatggaaggcagacaagtcctcgaggtgaaaatgcaggtggaatatatgtctttttcagctcacgcagatgccaagggtatcatgcagctcgtggggcaagcggagcctgaatctgtccttctggtccatggggaggcaaagaagatggagttcttgaagcaaaaaattgagcaggagcttagggtgaattgctacatgccagccaatggggaaactgtgacactccccacaagcccgtcaatcccagtcgggatcagcctgggattgttaaagagagagatggcgcaaggcctgctgccggaggccaagaaacctcggctcttgcatggtactcttattatgaaagactctaacttcaggctggtttcgagcgagcaggccctcaaagagcttggcctcgccgaacaccagttaagatttacttgccgggtgcaccttcatgacacacgaaaggaacaggagaccgccctgcgggtttactcccacctgaagtctgtgcttaaagatcattgcgtgcagcatctaccagacgggtccgttaccgttgagtctgtgcttcttcaggcagctgcacccagcgaagacccgggaactaaggtactactggtttcctggacctaccaggacgaggagctgggatcgtttctcacaagtctcctcaagaagggtctgcctcaggccccttcctag

SEQ ID NO: 31421 - DNA, 399 bp, synthetic construct
  source 1..399: mol_type = other DNA; note = Synthetic coding sequence
atgaagaaggtgcgtcttaaggagctcgaaagccggctgcagcaagtggacgggttcgagaaaccaaaactcctgctggagcaataccctacacgcccacatattgctgcctgcatgctctatacaatccataatacctacgacgatatcgagaacaaagtcgtcgccgacctaggctgcgggtgcggagtcctgagcattggcaccgcgatgctcggcgcagggctgtgcgtcggattcgatattgatgaggacgcactggagatttttaaccggaatgccgaagaatttgaactgcagattttaacctggtttaacgtcatgtgcgcttattacctgacagagtgcccatcccatagcatccagaactacgagagctcattatgggaccagaaatag

SEQ ID NO: 31422 - DNA, 1371 bp, synthetic construct
  source 1..1371: mol_type = other DNA; note = Synthetic coding sequence
atgatggtgggagatggaacaacaagcgtgactctgctggctgcagagtttttgaagcaggtgaagccttacgttgaggagggattgcaccctcaaatcattattcgcgctttccgcactgctacccaactcgccgtcaacaaaataaaggagatcgcagttactgtgaagaaggctgataaggtcgagcagcgtaaactgctcgagaaatgtgctatgaccgccttatcctctaaactcatttctcagcaaaaggcttttttcgccaaaatggtggttgacgctgtgatgatgctggatgacctgttgcagttgaagatgatcggcatcaagaaagtacagggcggagcgctcgaagactcccaactggttgccggagtcgcttttaaaaagactttttcttatgcaggattcgaaatgcaacccaagaaataccacaaccctaagatcgccctgcttaatgtggaactggagcttaaggccgagaaggataacgcggagataagggtgcacacagttgaagattatcaggccattgtggacgcagaatggaacattctgtatgacaagctcgaaaaaattcaccactcaggggctaaggtggtcttgtccaagctgcccattggggacgtggccacacaatactttgctgaccgcgacatgttttgcgccggacgtgtgccggaggaagatctcaagagaacaatgatggcttgcggaggctcaatccagacttccgtgaacgcactgtcagccgacgtgctaggtcggtgtcaagtcttcgaagagacccagatcggaggggaaagatataacttttttaccgggtgtcctaaagcgaaaacctgcaccttcatcctccggggaggcgcagagcaattcatggaagagacggaaaggtccttgcacgacgctattatgattgtgcgcagggccattaaaaacgattcggttgtggcgggtggaggcgctatagaaatggaactctctaagtatctccgggactactcacgcaccatccccggaaagcagcagcttctcatcggtgcctacgcgaaagctctggagattattcccaggcagctgtgcgacaatgcgggatttgatgcaactaacattctcaacaagcttcgcgctcgtcacgcccaaggtggcacctggtacggagtagacatcaacaatgaggatatagctgataactttgaagcgtttgtctgggagcctgccatggtgcgaattaatgctctgacagccgcaagcgaggctgcctgtctgattgtatctgtggatgagacaattaagaatcctaggtcgacagtggatgcacctaccgctgcgggtagagggcgtggaagagggaggcctcactag

SEQ ID NO: 31423 - DNA, 2520 bp, synthetic construct
  source 1..2520: mol_type = other DNA; note = Synthetic coding sequence
atggacggaaaggccgatgtcaagtccctgatggccaagtacaacacaggtggcaaccccaccgaagacgtatccgtcaattcacgcccatttagagtcaccggtcctaacagcagtagtggaattcaagctagaaaaaatctatttaataatcagggcaatgcatcaccgccagctggcccatccaacgtgcctaagttcgggtctcctaagccaccagtcgccgtcaaaccatcttcagaggagaagccagacaaagaacctaagcctccctttctcaagccaaccggtgccggacagaggttcggcacacccgctagcttgactacacgggatcctgaggccaaggtaggcttcctgaagccggtgggccctaaacctattaacctaccgaaggaagacagtaaacccacattcccctggcccccagggaataagccctcacttcacagcgtgaatcaggaccacgatctgaaacccttgggacctaagagtggcccaactcccccaacctcagagaacgagcagaaacaggcatttccgaagctgaccggtgtgaagggcaagttcatgagcgcctctcaggacctcgagcccaagcctctgttccctaaacccgctttcggccagaagccccctctgagcacggaaaatagccatgaggatgagtctcctatgaaaaatgtctcctccagcaagggcagtccagcgcctctcggagttcgctccaagtctgggcctctaaaacctgctcgcgaagattcagaaaataaagatcacgccggagaaatttcatcactgccttttcctggggtggtgctgaaaccggctgctagtcggggaggcccaggattgtcaaagaatggcgaagaaaagaaagaagaccgcaagatcgacgcggcaaagaacacatttcagtctaaaattaaccaggaagaattagcctccggcactcccccagccagatttcctaaggccccatccaagctgactgtggggggtccctgggggcaatcacaggaaaaggagaagggagacaagaacagcgcaaccccaaagcagaagccgctaccgcctctattcacattggggccacctccccctaagccaaatcggccacccaatgtggatctgacgaagttccataagacaagttctggcaacagcacttcaaaaggccagaccagttactccaccacttcgctccctcccccaccaccgagccaccccgcatctcagcctccgctgcccgcttcccatcccagtcagccgccagtgcctagtctgccaccaagaaacatcaagccccctttcgatcttaaatctccggtcaacgaagacaatcaagacggggtaacacactcggatggtgctgggaacctggacgaagaacaggactccgagggagaaacttatgaggacatagaggcttccaaggaaagggaaaaaaagcgcgaaaaggaggagaagaaaagattggagcttgaaaaaaaggagcagaaagagaaggagaaaaaggagcaagagattaaaaaaaagttcaaactaaccggtcctatacaggtgatccacctggctaaagcctgttgtgatgtgaaggggggtaagaacgagcttagcttcaaacaaggcgaacaaattgagatcatccgtatcacagataacccagaaggaaagtggttaggaagaaccgccaggggctcttatggctatataaagacgaccgcagtggagatcgattatgattccctgaaactgaagaaggattcactgggcgcaccgtctcgcccaatcgaggacgaccaggaggtctacgacgacgtagccgagcaggacgatatttcttcccacagccaatccgggtccggaggcatctttcctccgcctcccgatgacgatatctacgacggaatcgaggaagaagatgccgacgacgggagcacgttacaagtccaggaaaaatcaaacacctggtcctggggaatcctgaagatgttaaagggcaaggatgacaggaagaagtctattcgtgaaaagccaaaagtcagcgactctgacaataacgagggctcgtctttccccgcaccgcctaaacagctcgacatgggcgatgaggtctacgacgacgtggatacgagcgactttccagtgagctccgccgagatgtcacaggggacaaacgtggggaaagcgaaaactgaggaaaaggaccttaaaaagctgaaaaaacaggaaaaggaggagaaggactttcggaagaaatttaaatatgatggcgagataagagtgctctatagcacaaaggtgactacgtctatcacctcgaagaagtggggcacgcgcgatctccaagtgaagccaggtgagtcattagaggtcatccagactacggatgacaccaaagtgctctgtaggaacgaagagggcaaatacgggtacgtgctgagatcttacctggctgacaacgacggcgagatctatgacgacattgccgacggatgtatttatgacaatgactag

SEQ ID NO: 31424 - DNA, 1017 bp, synthetic construct
  source 1..1017: mol_type = other DNA; note = Synthetic coding sequence
atggggcatagatacattgaagtgttcaaatctcaccggacagaaatggactgggtcttgaaacactccgggccaaactccgcagatagtgcaaacgatggattcgtacgactgagggggcttccctttgggtgcacgaaagaggagatcgtccagttttttagcggactcgagatcgtaccaaatggcatcacattgcctgtagaccccgaagggaagatcaccggtgaagcttttgtgcaatttgcctcccaggagttggcagagaaggcgctggggaaacataaagagagaataggtcatagatatattgaagtctttaaatcgagccaggaagaggtcaggtcatacagcgatccaccccttaaattcatgtcagttcagcgcccaggaccatacgataggccgggaaccgcccgtcggtatattggcatcgtaaaacaagctggattggagcgtatgcggccaggcgcatattctaccgggtatggcggatacgaggagtatagcgggctcagcgacgggtatggatttaccacagacctctttggccgagatctgtcctattgtctgagcgggatgtacgatcatcgctacggggactccgaatttactgtacaatctacaactggccactgcgtgcatatgaggggccttccttataaagcaaccgagaacgacatttataatttcttttctccgctcaatcctgtgagagttcacattgagattggcccagatggcagagtgactggagaggccgacgtcgagtttgcaacgcacgaggaggcggtcgcagccatgtcgaaggatcgagctaacatgcaacacaggtacatcgagctttttttgaacagtacaacaggcgcttcaaatggtgcgtatagttcccaagtgatgcagggaatgggggtgagcgctgcacaggccacctacagtggactcgagagccagtctgtttctggctgctatggcgctggatacagtggtcagaatagcatgggcggatacgattag

SEQ ID NO: 31425 - DNA, 1536 bp, synthetic construct
  source 1..1536: mol_type = other DNA; note = Synthetic coding sequence
atggcctcagttgtggagtacaagggcctgagggccggatatcactgtggctactgtgacagtaaagagggcaaagcttcgtgcgggatgtgggcccacagtatgactgtccaggactatcaggacctcatcgacagagggtggaggagaagcgggaaatatgtgtacaaacctgttatgaatcaaacgtgctgtccacaatacactatcaggtgtcggccattgcagttccagcctagcaagtctcataaaaaagtgctgaaaaaaatgctgaagttcctggctaaaggggaggttcccaaaggttcctgtgaggatgagccaatggacagtactatggacgatgccgtggccggtgactttgcccttattaataaattagacattcagtgtgacctgaaaacactgtccgatgacattaaggagtctttagaaagcgaggggaagaactccaagaaggaagaaccacaggagcttctgcaaagccaagacttcgtgggagagaagttgggcagcggagagccatcgcatagcgtgaaggtgcacaccgttcctaaacccggaaaaggcgcagacctttctaaacccccttgcaggaaggccaaagaaataaggaaggagaggaagcggctgaagttgatgcagcagaatcctgcgggagaactcgagggatttcaggcccagggccatcccccttccctcttcccacctaaagcaaagtccaatcagcctaagtcactggaagatctcatctttgaaagtctgcctgaaaatgcgtctcacaaattagaagttagacttgtgcctgtgtcttttgaggaccctgagtttaaaagctcattttctcagtccttctctctctatgtaaagtatcaggtggctatccaccaagacccgccagacgaatgcggaaagacagagtttacaaggttcttgtgttccagcccacttgaagccgaaacacctccgaatggacctgactgtggctacggctcgttccatcagcagtactggctagatggcaaaattattgctgtgggagtcatagacattctgcctaactgtgtgtcctctgtctacttgtattatgacccagactactcattcctgagtctgggcgtgtattcagccctgcgcgagattgcatttacacgacagcttcacgagaaaacctctcagctgagctactattacatgggcttttacattcattcgtgccctaagatgaagtacaaaggacagtaccggccttccgatctcctctgcccagagacttacgtatgggtgccaattgaacagtgtctgcctagcttggagaactccaagtattgtcgctttaaccaggatcccgaggctgttgacgaggatcgcagcaccgagccagaccggcttcaggtatttcataagcgagccataatgccatatggtgtttataaaaaacagcagaaagacccctcagaagaggctgccgtgttgcaatacgcctccctagtgggtcagaaatgtagcgagcggatgctactgtttcggaattag

SEQ ID NO: 31426 - DNA, 3963 bp, synthetic construct
  source 1..3963: mol_type = other DNA; note = Synthetic coding sequence
atgcaggacgattccatcgaagcttctactagtatcagccagctactgagagagagctaccttgcagagaccaggcaccgcggtaataacgagaggagcagagcagaaccctcgtctaacccttgccacttcggatcaccttccggtgctgctgaagggggaggaggccaggacgacctccccgatctgtctgctttcctgtctcaggaggaactggatgagagtgttaacctggcaaggctagccatcaattacgatccattggagaaggcagatgagacacaggcacgaaaacgcctctcccccgaccagatgaagcacagtccaaatttgagcttcgagcctaacttctgtcaggataatccccgttctcccacatcgagtaaggagtctcctcaggaggcaaaaaggccacaatactgttcggagactcaaagtaagaaggtattcctgaataaagcggctgatttcatcgaggagctaagttccttattcaagagccactctagcaaaaggatacgcccacgcgcttgtaaaaatcacaaatccaagcttgagtcacagaacaaggtgatgcaagagaacagcagcagtttctctgacttgtcagaacggagggagcgaagctctgtccccatccctatcccagcagacacccgagataacgaagtcaaccatgccttagagcaacaagaagccaagagacgcgaagcagaacaagccgcttcagaggccgcaggaggtgacacgactcctgggtcttccccctcttcgttatactacgaagaacccctgggacagcctcctcgatttacccagaagctccgctctagggaggttccagaagggacacgtgttcagctcgactgtattgtggtgggcattcctcccccacaagttcggtggtattgtgagggcaaggagttggagaatagccccgacatacatatcgtgcaagcgggaaacctccactctcttactatcgcagaagcctttgaagaggacaccggccgatattcttgctttgcaagtaatatttacggaacagatagcacctctgccgagatctacatcgagggcgtgtcatccagcgacagcgagggagaccctaacaaggaagagatgaacagaatccagaagccaaatgaagtcagttcaccacccaccactagtgccgtgatacctcctgccgttccccaggcccaacacctcgtcgctcagccccgagtcgcgactatccaacagtgccagtcaccaacgaactacctgcaaggtctagacggcaaaccaatcatagcggctcctgtcttcactaagatgctccagaatctctccgcatccgagggccaactagtcgtgttcgagtgtcgtgttaagggcgctcccagcccaaaggtggaatggtaccgcgagggaaccctgatcgaagacagccccgactttaggatcctgcagaaacgccctgtttgtatggagcacatagaggaaatatgtactcttgtgattgctgaagtgttcgctgaggattccggctgctttacttgcaccgctagcaacaagtatggcactgtttcctcaatagcccagttacatgtacgcggaaacgaagacctttccaacaatggcagccttcattctgctaacagtaccacaaatctcgccgcaattgagccacagccttccccaccccattctgagccaccgagcgtggagcagcctcctaagcctaagttagagggtgtgcttgtgaatcacaatgagcctcgctcaagttctaggatcggactgagagtgcactttaaccttcctgaggatgataaaggcagcgaggcctcgagcgaggccggagtggtcaccaccagacagactaggcccgactctttccaagagagattcaatggccaggctaccaagacgcccgagccgagcagtcccgtcaaagaacccccaccagtcctggcaaaacccaaactggactcaacccaattacagcagctgcataatcaggtcctgctcgaacaacaccagctgcaaaaccccccacccagcagcccgaaagagttccctttttccatgaccgtgctgaactccaatgccccacccgcagtgaccaccagcagcaagcaggtcaaagcaccgagtagccaaacattctcgcttgcaagaccgaaatatttcttcccttctaccaatactactgcagctaccgttgcccctagcagttcccccgtgttcactctttctagcacaccacagaccatccagagaacggtgagcaaagagtctctgctggtcagtcacccctctgtgcaaactaagtctccgggagggctcagtattcagaatgagccattaccacccggacccacagaacctacgcctccaccattcacctttagcataccctctggcaaccagtttcagcctagatgcgtgtctcctatcccagtttctcccacctcaagaattcagaatccggtggctttcctctccagcgtgctcccatctctgcctgcaatcccaccaacaaatgcgatgggactcccgcgtagcgctccttccatgccatctcaaggactggctaagaaaaacaccaaatctccacagccggtgaacgatgacaatatcagggagacgaagaatgccgtgattcgcgatctcgggaaaaagattaccttttccgacgtcaggcctaaccagcaggagtataaaattagtagctttgagcaaagactgatgaatgaaattgagtttagattggaaaggacacctgtggatgagagcgatgacgagatccagcacgacgagattcctactggcaagtgtatcgcaccgatcttcgataagcggcttaagcactttcgagtgactgaaggaagtcctgttacttttacctgcaaaatcgtcggaattccggtcccaaaggtctactggttcaaagacggtaaacaaatctccaaacgaaatgaacactgcaaaatgcgcagagaaggcgatggaacatgtagtctccacatcgagtctacaacttcagacgatgatgggaactacaccattatggccgcaaatcctcagggccgtatttcttgctcaggacatctgatggtgcagtcactgcccataagatccaggctcacgtcggccggacagtcacaccgaggcaggtcccgcgtacaagaaagagacaaagagccactgcaggaaagatttttccggcctcacttcctccaagcccctggtgacatggtggctcacgaaggcagactgtgtcggctagactgcaaagtgtcaggtcttcctccgccagagctgacgtggctgctcaacgggcagcccgttctccccgacgcctctcacaaaatgttagtacgcgaaactggggtgcattcacttctgattgacccactgactcagagggacgccggaacatataaatgcattgcaaccaataaaacagggcagaactcgtttagtctggaactgagcgtggtcgctaaagaggtcaaaaaggcacccgttattctcgaaaaactgcaaaattgcggtgtccctgaggggcacccagtcaggttggagtgcagagttatcggcatgccaccccctgtgttctactggaaaaaggacaacgaaactatcccatgtaccagggaacggatcagcatgcaccaggacaccaccggatacgcatgcctcctcatccaacccgctaagaagtcagatgcaggctggtacacgcttagcgccaagaacgaagccggaattgtatcttgcacggcgcgtctcgacatctatgcccagtggcaccaccagattcctccccctatgagtgtgagaccaagcgggtctaggtacggtagtctgacaagcaaaggactggatatatttagtgccttctcctccatggaatccactatggtttatagttgttcctctagaagcgtggtggaatcggacgagctttag

SEQ ID NO: 31427 - DNA, 2292 bp, synthetic construct
  source 1..2292: mol_type = other DNA; note = Synthetic coding sequence
atgcaggatcttggcgataagctacgcatgattgtcatgggacaccgccgagttcacatctcccgtcagctggaggtggagccggaggaacccgaagccgaaaacaaacataagccgcgacgcaaatccaagaggggcaagaaggaggcagaagacgaactttccgcacggcacccagctgaactcgccatggagccaaccccagaactcccagccgaagtgctgatggtggaagtcgagaacgtggtgcatgaggatttccaagttacagaggaagttaaagcactgacggccgagatcgttaagaccattagggacattattgcactgaatccactttacagagagagtgtgctccaaatgatgcaagctggtcagagagtggtggataacccaatctatctgagtgatatgggcgcagctctgacgggggcagagtctcacgagctgcaagacgtactggaggagaccaatattcccaagcgcctgtataaagccctgtctctattgaagaaggagttcgagctcagtaaactgcagcagcgtttaggccgagaagtggaggagaaaattaaacagacacatcgcaagtatctgctgcaggagcagctcaaaattattaaaaaggaactgggtctcgaaaaagacgacaaggacgcaattgaggaaaagttcagggagcggctcaaggagttggttgtgccaaagcatgtgatggacgtggtcgacgaggagctcagtaagctgggactgctggataaccacagtagcgagttcaacgtcacccgtaactacctcgattggctgacatccatcccgtggggcaagtactctaacgagaacctcgatcttgctagggcccaggccgtgctcgaggaggatcattacggaatggaggatgtgaaaaagcggatcctggagtttatcgccgtcagtcaactccgcggatcgacacaaggaaagatcctgtgcttttatgggcctcccggtgtgggcaagacatctatcgcccgatcaattgcccgtgccttgaaccgcgagtatttcagattctcagtgggtggaatgaccgatgtggccgagatcaaggggcacaggcgcacgtatgttggagccatgccaggtaagataatccagtgtctgaaaaaaactaagacagagaaccctctgatcctaatcgacgaagtggacaaaatcggcagaggataccaaggtgatccctctagtgctctactcgaactcttggatcccgagcagaatgccaactttcttgaccattacctggacgtacctgtcgatcttagtaaagtgctgtttatttgcacagccaacgtgacagacacgatccctgaaccactacgagacagaatggaaatgatcaacgtgagtgggtacgtcgcgcaggagaagctcgctatcgcagaaaggtatctcgtcccccaggctcgcgctctgtgcggactggacgagtccaaggctaagcttagttctgatgtccttacactgttgatcaagcagtactgtcgagaatctggtgtgaggaatctgcaaaaacaggtagagaaagtgttacgcaaaagtgcctataagatcgttagcggggaggccgaatccgttgaggttacaccagaaaacctccaagactttgtggggaaacccgtttttacagtggagcgcatgtatgatgtaacgcccccaggagtggtgatggggctggcttggaccgcgatgggcggttccaccctgtttgtcgagacaagcctgagacgtccacaggacaaggatgccaagggagacaaggacgggtccctggaagtaacaggacaactgggggaggtcatgaaggagagcgcacgcatcgcctacacattcgcacgggcttttctcatgcaacacgcacccgctaatgactacctggttacatcccatatccacctgcatgtgcctgagggagctacaccaaaagacggcccttctgctggctgcactatagtgaccgctcttttgtccctcgcaatgggaaggcccgtgcggcaaaaccttgcaatgacaggtgaagtgtcgctgaccgggaaaatcttgccagtgggtggcattaaagaaaaaacaatcgcagcgaagagagcaggagtcacctgcattgtgctccctgcggagaataagaaagacttttatgatctcgcagccttcatcacagaaggactggaggtacattttgtggagcattatcgggagatcttcgatatcgccttccctgacgagcaggcagaggctttagctgttgaacggtag

SEQ ID NO: 31428 - DNA, 558 bp, synthetic construct
  source 1..558: mol_type = other DNA; note = Synthetic coding sequence
atgaataataaccagatagtggccaaggacctgcaggatgaaaaaattctctatccagagtttaacaaactcaaagagagaaatagggagctaaagacactcctgtcaattgggggatggaatttcggaacctcccgcttcactactatgctgtcgacattcgcgaatagggaaaaattcattgctagcgtgatttccctgttgaggacacacgacttcgatgggctcgacctgttttttctgtaccctggcctgagggggtcccctatgcacgataggtggacttttttgttccttattgaggagctactgtttgcctttcgtaaagaggccctcttgaccatgcgaccgagactgctgttatcagccgctgtttctggagttcctcatatcgtgcagacatcatatgacgtgcggttcttggggcgttttgtgccgcttagcggcgagagaaggtctaccggcctgattaccagtatgagtcgtatgcccactaggggcaaatcaggcctcgctatgaccatgccaagcgctagcgttacacgacacggtttatag

SEQ ID NO: 31429 - DNA, 1269 bp, synthetic construct
  source 1..1269: mol_type = other DNA; note = Synthetic coding sequence
atgtccggagggaccccctacatcgggtccaagatatccttgatcagtaaagccgagattcgttacgagggaatactttataccattgatacagagaactctacagtggcgcttgcaaaggtcagatcttttggtactgaggacaggccaacagaccgccctattcctccaagggacgaggtgttcgagtacatcatcttccggggttccgatataaaagacctaacggtgtgcgaaccacccaagccccagtgctcacttcctcaagaccccgctatcgtgcaatcgtccctgggttcctctacaagctcctttcaatccatgggctcttatgggcctttcggtagaatgcccacatactctcagtttagtccttcctctttggtggggcaacagttcggagcagtgggggtcggccgttcgtcccctcagttggatccattacgaaaatcgccaaccatggaacaagccgtgcagactgcttcagctcacctgccagcaccagccgcagttgggagaaggagtccagtgagtacacgaccactgccttctgcaagtcaaaaggcaggcgaaaatcaggaacacaggagagcagaagtacacaaggtctcccggccagagaacgagcaactcaggaatgacaacaagcgtcaggttgctcccggagccccttctgcccctcgcagaggcagggggggtcacagaggcggaaggggtcgctttggaataaggcgggacggccctatgaagtttgaaaaggacttcgatttcgagtccgcaaatgcccaattcaacaaagaagaaatcgacagggagtttcataataagttgaaactgaaagaagataaattagagaagcaggagaagccggtcaatggcgaggacaagggtgacagcggggttgatacacagaacagcgagggcaacgcagacgaggaggaccctttgggaccaaactgttactacgacaaaaccaagagcttctttgacaatatttcgtgcgacgacaacagggagcgtaggcctacatgggccgaagagcggagacttaacgctgagacattcggaattccactcaggcccaacagaggcagagggggttacagaggacgagggggtctgggcttcagaggcggaaggggtcggggaggaggaagagggggtacgttcaccgcccctagaggcttccggggtgggtttagagggggtaggggaggacgtgagttcgccgattttgagtaccgcaaaaccacagcattcggcccatag

SEQ ID NO: 31430 - DNA, 1266 bp, synthetic construct
  source 1..1266: mol_type = other DNA; note = Synthetic coding sequence
atggcttcctcgtctgtcccccctgcgaccgtttccgccgcaacagcgggacccggtcctgggttcgggttcgcatcaaagacaaagaaaaaacacttcgtccaacagaaggtgaaagttttccgagctgctgacccactggtcggcgtgttcttgtggggcgtagcacactcgatcaatgagttgagccaggttcctcctccagtgatgttgctccccgacgacttcaaggcgtcttcaaaaatcaaggtcaacaatcatctgttccacagggaaaacctcccaagtcacttcaagttcaaggagtactgccctcaggtgtttagaaacctgcgcgatcgctttggaatagatgatcaggattatctggtgagcctgacaagaaacccaccatcagagtccgaaggcagcgacggcagattccttatcagctacgacaggactctggtaattaaggaagtctcttcagaggatatcgccgatatgcactctaacctgtcaaactatcatcagtatattgtcaagtgtcacggcaacacgctgctcccccagttccttggaatgtatcgtgtgtccgttgacaatgaagattcctatatgcttgttatgcggaacatgtttagtcataggctgcccgtacatcggaagtacgatctgaagggatctctcgtgtcaagagaggcctcagataaagagaaggtcaaggagcttcctacactcaaagacatggacttcttgaataaaaaccagaaggtatatattggagaggaggaaaagaagatcttcctcgagaagttgaagagagatgttgagtttctcgttcagctgaaaatcatggactactccctgctgctcgggatacacgatatcattagaggcagcgaaccagaggaagaggcacccgtaagagaggacgaaagtgaggtagatggcgattgctcactgacaggccctcctgcactggtggggtcatacggaacttctcccgagggcattggtggctatatccatagtcatcggccattgggcccaggggagttcgagtcatttatcgacgtctacgctatccggtccgctgaaggagctccgcaaaaggaggtttacttcatgggcctgatcgacatcctcacacaatacgacgcgaagaagaaggccgcacacgctgctaagacggttaagcatggagccggtgcggaaatctccacggtgcaccccgagcaatacgccaagcgtttcttagactttatcaccaacattttcgcttag

SEQ ID NO: 31431 - DNA, 756 bp, synthetic construct
  source 1..756: mol_type = other DNA; note = Synthetic coding sequence
atggacagcgagctgatgcacagtatagtggggagttaccataagccgccagagcgggtgttcgtcccttcattcactcagaatgaaccgtcgcagaattgtcaccctgccaacctcgaagttacttcgcccaagatcttacactcaccaaattctcaagcactgatcctcgccttgaagacactgcaggagaaaattcaccggctggaattggaaaggactcaggctgaagataatttgaatatcctgtcgagggaggccgcacagtacaagaaggcgctggaaaatgagacaaatgagaggaatttggctcaccaggagcttattaaacagaaaaaggatatatccattcagctgagtagtgcacagagcagatgtacactgctggaaaaacagctcgaatataccaaaagaatggttctgaacgtagaaagagagaagaatatgatccttgaacagcaggcacagttacagcgcgaaaaggagcaggatcaaatgaagctgtacgctaaattagaaaaactcgacgtcctggagaaagaatgctttcggttaacgaccacccagaagacggccgaagacaaaatcaaacaccttgaagagaaactgaaggaagaagagcatcaacgtaagctgttccaggataaagcaagcgagctgcaaacaggtctagagatctccaaaatcattatgagtagcgtctctaatctgaaacattccaaagagaaaaaaaagtcctctaaggtgtgcatctag

SEQ ID NO: 31432 - DNA, 1980 bp, synthetic construct
  source 1..1980: mol_type = other DNA; note = Synthetic coding sequence
atggatagtcagggtagagtatgggctcaggaaatgctgctgcgagtctcccctgatcacgtaacgctcctggacccagcaagtaaggaagaattggagtcttaccccttgggagccatcgtccggtgcgatgcggtcatgcctccaggcagaagcaggtccctgttgctgcttgtgtgtcaggagcctgagcgcgcacagcctgacgttcatttcttccaaggtctccgcctgggtgcggagctgatccgagaggatattcagggcgctctgcacaattaccggtccggcaggggggagaggcgggctgctgccctcagggccacccaagaagaactacaacgagatagaagtcccgctgctgagacccctcctctccagcgacgcccatccgtgagggcagtaatcagcaccgtcgaaaggggagccggaagaggacggcctcaggcgaaaccaatccccgaagccgaggaagcgcagcggcctgaacccgtgggcacttcaagtaatgccgactcagcgagcccagatcttggcccacgcggacccgatctggccgtcctacaggccgaacgcgaggtagatattctgaatcacgtattcgatgatgtggagtcctttgtgagtcggcttcagaaaagtgcagaggccgctagggtgctcgaacacagggagaggggacgaaggtccagacggagggctgcaggcgaaggcctgctcactctccgtgccaaaccaccttccgaggccgagtacacagatgtgctccagaaaatcaaatatgcatttagccttctggccaggctgagggggaacattgctgatccgtcctcaccagaacttctccactttctgtttggaccactgcagatgatagttaacactagtggcggtccagagtttgcatcgtctgtgcggcgacctcaccttacttccgacgccgtagccctcttgagagacaacgtgacaccacgcgagaatgagttgtggacttcactgggtgacagttggactcgcccaggcctggagctatctccggaggaaggaccaccttatcgcccagagttcttctctggttgggagccaccagtcactgatccccagtctcgagcatgggaagacccagtggagaaacagctgcagcacgagcgcaggcgtagacaacagtccgcgccacaggtggccgtcaacgggcatcgggatttagagccggaaagtgagccacagctggaatcggaaactgctgggaagtgggttttgtgtaactacgatttccaggcgaggaattcatccgaattgtcggtgaagcagagagatgtattggaagtcttggacgatagccggaagtggtggaaggttagagatccagccggacaggaagggtacgtaccttacaatattttaactccgtatcctggtccccgattacaccatagccagagccccgctcgttcactgaatagcacacccccaccgcctcctgcccctgcgccagctccgcctccagcccttgcgaggcccagatgggacagacccaggtgggattcttgcgattccttaaatgggcttgacccctctgaaaaggaaaagttctctcaaatgctcattgtgaacgaagagttacaggccaggttggcgcaggggagatcaggtccctctcgggcagtgcccggacctcgggctcctgagccccagctgagtcctggtagtgacgcctctgaggtgagggcctggcttcaggcaaaaggctttagctcaggtaccgtcgacgctctgggagtcctgaccggtgcccagctgttctcactccagaaagaagaactcagggccgtgagccctgaggagggcgcacgcgtgtacagccaggtcaccgtgcagcgtagccttttggaagacaaagaaaaagtgagcgagctcgaggccgttatggagaaacagaagaaaaaagtggagggagaagtggagatggaagtcatctag

SEQ ID NO: 31433 - DNA, 3702 bp, synthetic construct
  source 1..3702: mol_type = other DNA; note = Synthetic coding sequence
atgaatacgaagaagcgaggctctcccgctcgcacccattcaatgatgtcacttagtgtgcgccctcaacggagactgctgtccgctcgcgttaacaggtcccagagcttcgccggagtgctgggcagccatgagagaggccctagatctttcccagtgttctctccacccggtcctccaaggaaacccccagcgctaagtagagtaagccgcatgttttccgtggcccatcccgctgccaaggtgcctcagccggagaggctcgacttggtgtatacggcactcaagcggggactcacagcttacctggaggtacaccagcaggaacaggagaaacttcagggccagattcgggaaagtaagcgaaactcgcgcctgggctttctatatgatctggataagcaggtcaaaagcattgagaggttcctgaggcgcctcgagttccacgcgagcaagatcgatgaactttatgaagcgtattgtgtccagcgcagattgcgcgacggggcttacaatatggtgagagcatacacaacaggaagccccggaagcagagaagccagagattcattggcagaggcaactagaggacaccgcgagtataccgaaagcatgtgtctgctggagagtgagcttgaagcacagctgggtgagtttcatctacggatgaagggcctggcgggattcgccagactgtgcgttggggatcaatacgagatatgtatgaaatacggacgacaaaggtggaaactgcggggaagaattgaggggagtggaaagcaagtgtgggattccgaggaaaccatattccttcctctactgactgagttcctgagcattaaggttaccgagctgaaaggcctggccaatcacgtcgtcgtgggtagcgtgtcttgtgagactaaggacctgtttgcagccctcccacaggttgtggccgttgacatcaatgatcttggcactatcaaactatccctggaggtaacatggtctccttttgataaagatgatcaacccagcgcagcaagttccgtcaacaaagcatctactgtcactaaaaggttcagtacatatagccagtctcctcccgacaccccatccttgcgcgaacaggcattctacaacatgctgaggcgccaggaggaactggagaatgggacggcctggtccttgtcctccgagagttcagatgactctagttctcctcagctgagtggcaccgccaggcatagccctgcgcctaggccacttgtgcaacaacctgagccacttcctattcaggttgcatttaggcgtcccgagacacctagttctggtccactggacgaagaaggggcagtggccccagtcctggcaaatggccatgctccttactcccggacactttcgcatatctccgaagcctcagtggatgcggctctagcagaggcctcagtggaggccgtcggccctgagagcttagcttgggggccttctccacctacacatcccgcaccaactcacggagagcaccccagccctgttcctcccgcactcgatccagggcattccgccaccagttcaacgcttggcaccacaggctcagtcccaactagcaccgatcccgctccaagtgcccaccttgattcggtgcacaagagcacggactctggaccgtcagaacttcctggaccaactcacaccacgacgggatctacctactcagctatcacaacgacccatagcgccccaagtcctttgactcataccacaaccggatccactcataagcctattatttctactctgacaaccacaggccctactctgaacattatcggacccgtgcaaacgacgacctcacctacccatacaatgccctctccgactcacacaaccgccagccccacgcatacaagcactagccccactcacacaccaacctccccaactcacaaaactagcatgtccccaccgactacaacatccccaacaccttcagggatgggattagtgcagaccgccacaagccctactcatcccactactagtcctacacatcctacaacgtctcccatcctgatcaacgtgagccccagcacgagtctcgaactggctacactcagctcccctagtaaacattcagaccccactctccccggaaccgattccttgccctgttctccacctgtgagcaactcatacacacaggcggatcctatggccccacggactcctcacccgagcccagctcattcctctaggaagcctctgacaagccctgctcctgatcccagcgaatctacagtccagtctctcagtcccacaccctcaccccctactcccgcaccacagcactcggacctttgcctggccatggccgtgcagacaccagttccaacagcagcaggtggaagcggcgatcggtctctggaagaggccctcggtgcactgatggccgcactcgatgattataggggacagtttccggaacttcagggcctggagcaggaggtgacaagactggaaagcctcctaatgcagagacagggcctcacccggtcccgcgcatcgtcactttctatcactgttgaacacgcattggagagtttctcattcctcaacgaagatgaggacgaggacaatgatgttccaggggataggcccccttcctcacctgaagccggagctgaagattccattgacagcccgagtgcacgccctttgtccacaggttgcccggcattagacgcggcactggtcagacatttataccactgctccagactgcttctgaaacttgggaccttcgggcctcttcggtgtcaggaggcttgggcactggaaagactccttagggaggcgcgagtgctggaagctgtgtgtgagttcagtcggaggtgggaaataccggcaagcagtgcccaagaggtagtgcagtttagcgcctctcgaccaggctttctgaccttctgggaccaatgcaccgaaaggttgtcgtgcttcctgtgccctgttgagagggtgctgttaactttctgcaaccaatacggagctcgcctctccctgaggcaacccggtctggctgaagcagtttgcgtcaaatttctggaggatgccctggggcagaaactccctaggagacctcagccaggacctggtgaacaactgacagtttttcagttttggtccttcgtggagactctcgactctcccactatggaggcttatgttaccgagacagccgaagaggttctcctcgtgcgaaatctgaattcagatgaccaggcggtagttctgaaggccctgagactggctcccgaaggcagactgagacgggatggcctccgggcactgagttcactccttgtacacgggaacaacaaggtgatggcggctgtgtctactcagctcagatcgctcagtttaggaccaaccttccgggaaagggcgttactctgcttcctcgatcagctggaagacgaggatgtgcagacccgggtggccggttgcctggcactgggctgtatcaaggccccagagggcatagaaccccttgtatatctgtgccagacagatacagaggcagttcgcgaagccgctcgacagtccctgcaacaatgtggtgaagagggccagtccgcccataggcggttggaagagtccctcgacgctctgccgaggattttcggtccaggctctatggcgagtaccgcattctag

SEQ ID NO: 31434 - DNA, 1428 bp, synthetic construct
  source 1..1428: mol_type = other DNA; note = Synthetic coding sequence
atggatcagatggtccagcatcctgcggctaaaatgatcgtgatggccagtcatatgcaggaacaagaggtaggggatggcaccaacttcgtcttagtatttgctggagctttattggagttggcagaagagttgttacgaattgggctgtcagtgtccgaggtaatcgagggctacgagatagcctgcagaaaagcccacgaaattctgcccaatctagtttgctgctctgccaaaaacctgagggatatcgatgaagtcagctccttgctaagaacatctattatgagtaagcagtacggaaatgaggtgttcctggccaagctgatcgcccaggcatgcgtgagcattttccccgacagtgggcactttaatgtggataacatcagagtgtgtaaaatcctagggtctggtatctccagcagctcagtcctgcatggcatggtgttcaagaaggaaacggaaggtgatgtgactagcgtaaaggacgccaaaatagcagtgtactcttgccccttcgacggcatgataacggagacaaaggggactgtccttatcaagaccgcagaagaactgatgaatttctccaagggagaggaaaacctgatggatgcacaggtgaaggccatagccgacaccggtgcgaacgttgtcgtcacggggggtaaggttgctgacatggccctgcactacgccaacaagtacaacatcatgcttgtacgtctgaactccaagtgggatttaaggaggttatgcaagacagtgggcgctaccgctctgccgaggctcacacctccagtgctcgaggagatgggccactgcgactccgtgtacttgagtgaagtgggggacactcaggtggtcgtcttcaaacatgagaaggaagacggagcaattagcactatcgtgctgagaggatctactgacaatctgatggacgatatcgaaagggcggtggacgacggcgtcaatacctttaaggtgcttactagagataagagactggtccccggtggcggagctacagagatcgagctcgccaaacaaattaccagctatggcgaaacctgccctggtctagaacagtacgccatcaaaaaattcgccgaggctttcgaagccattcctagagctctggctgagaatagcggggtgaaggcaaatgaggtaatcagtaagttgtacgcagtacaccaagaaggcaacaagaacgtgggattggacatcgaggctgaagtgcctgccgtgaaggacatgttagaagccggtattctggatacatacttgggaaagtactgggccatcaagctggccacaaacgcagccgtaaccgtgctgcgcgttgaccagatcatcatggccaaacccgcaggaggaccgaagcccccttcaggcaagaaggactgggacgatgatcagaacgactag

SEQ ID NO: 31435 - DNA, 1626 bp, synthetic construct
  source 1..1626: mol_type = other DNA; note = Synthetic coding sequence
atgcgagctttattgcacaagccagaaatgataaagcagattttgcccgaacattccgtgctacagaatataaactttgtcgaggccttccaggacgagttactggtgaccgaggtctatgacctaccccaaaggcccaatgacgtacagctgttttacggatcaatgtgtaaaataatacttagcgtcattggagagttcagagattgtatttcatcaagagagttcctgcagccttcctctaaggccagtctcgagagcacctctgacctgggcgcaagcggaaagcacggcggtaacgtgtctctggacgtccttccagtgaagggcccacagggctccccactactgtcccgagcggcacggccacctttggatcaactagcttctgaagagccttggaccgttcttccggaacatctgattctcgtggctcccagcccctgtgacatggctaaaaccggcaggttccagatcgtgaacaattcagtccgactattgagattcgagctttgctggcccgcacactgcctgacggtgacgcctcagcatggttgcgtcgcccctgaatccaaactacagatactcgtgtcgccgaattccagcctatccaccaaacaaagtatgttcccctggtccggcctgatttacatccactgtgatgacggacagaaaaagatcgttaaggtacaaatcagggaagatctcacgcaggtcgagctgttgaccaggctgacaagcaaaccttttggcatccttagtccggtgtccgaaccatctgtaagccatttggttaaacccatgacgaagcccccaagcacaaaggtagagattcgaaataaaagcattacgttccccacaacagagcccggagagacgtctgagtcttgtctggagttagagaaccacggcactacagatgttaaatggcacctgtcttctctggcgccaccatacgtgaagggggtggatgaatctggcgatgtgtttcgggctacatacgcggcatttagatgctcccccattagcggactgctggaatcccatgggatccaaaaggtaagtatcacatttctgcctaggggccgaggcgattacgctcagttctgggacgtggagtgccacccattaaaggagccacacatgaagcacactcttagatttcaactgtccgggcagtcaatcgaggccgagaacgaaccggagaatgcgtgcctctccaccgattctctcataaagattgatcacctcgttaaaccaagacgacaggcggtaagcgaagcaagcgcacgcatccctgagcagttggacgtgacagcaaggggcgtttacgcacccgaagacgtttatcgtttccgtccaacgagcgtgggcgagtctcgtaccctgaaagtgaatctgcggaataattccttcatcacacattccctgaaattcttgtcaccaagagagccgttttacgtgaagcatagcaagtactcgttgcgcgcacagcattacattaacatgccagtccagtttaaaccaaaatctgctgggaaattcgaagcactgctggtaattcaaactgatgagggaaaatcaatcgcaattagactaatcggagaggctctggggaagaactag

SEQ ID NO: 31436 - DNA, 1737 bp, synthetic construct
  source 1..1737: mol_type = other DNA; note = Synthetic coding sequence
atgagtagcaagggatcttccaccgacggccgaacagaccttgcaaatggcagtctgagtagcagccccgaggagatgtcgggcgcagaagagggtagagagaccagttcaggcattgaggtggaagcttccgacctctcattgtccttgaccggtgacgacgggggacctaacagaacgagcatggaggatactggacactattctattaacgatgaaaaccgcgtacatgataggtccgaggaggaggaagaagaagaggaggaagaggaagaagaacaacccaggagacgtgttcagcgaaagagagcgaaccgggatcaggactccagtgatgacgagcgggctctcgaggactgggtgtctagcgagactagcgcgcttccgcgaccacgatggcaagccttgccggcattaagggagagggagctagggagctccgctaggtttgtgtacgaggcctgtggcgcacgtgtcttcgtgcagcgctttcgactgcagcacgggttagaaggacacacagggtgcgtaaacaccttacacttcaatcagagagggacatggctcgcatctggcagcgatgatctgaaagtggtggtttgggattgggtgagacgtcaacccgtgctggatttcgagtcagggcacaagtccaatgtgttccaggccaagttcctgcctaacagtggggactccacacttgcgatgtgtgccagagatgggcaagtgcgagtcgccgagctcagcgcgacacagtgttgtaaaaatactaagcgagtggcccagcataagggcgcttcacacaagctggcactggaaccggactccccatgtacctttctatcagccggtgaggatgctgtggttttcaccatcgaccttcggcaagatcgccctgctagcaagctggtcgtgactaaagaaaaggagaagaaagttggcctgtatacaatttatgtcaatcctgcaaacacccatcagttcgccgtgggtgggcgagaccaatttgtgcgaatctacgatcagcggaagatcgacgagaacgagaacaatggagtactcaaaaagttctgcccacaccacctggtcaactctgaaagtaaagctaatattacctgtctcgtctatagccatgatggcaccgagctgctcgcatcctacaatgatgaggacatttatttgtttaatagctctcatagtgatggtgcacaatacgtcaagcggtataagggacaccgcaacaatgccacagttaagggtgtgaacttctacggaccaaagagcgaatttgtagtttccggttccgattgtgggcatatcttcctgtgggaaaagtccagctgccagattatccaatttatggagggagacaaaggaggcgttgtgaattgcctggaaccacacccgcacctgcccgtactcgcaacctcgggacttgaccatgatgttaagatctgggctccaactgctgaagcctcaactgagcttacaggcctgaaagatgtcattaaaaaaaacaagcgagagcgggacgaggacagcctgcatcaaacagatttgtttgacagccatatgctgtggtttctgatgcatcatctacggcagcggagacaccaccgcaggtggagggagccgggtgtaggggctactgacgcagatagcgacgagagcccatctagctctgataccagtgatgaggaggagggacctgatcgcgtgcagtgcatgcccagttag

SEQ ID NO: 31437 - DNA, 426 bp, synthetic construct
  source 1..426: mol_type = other DNA; note = Synthetic coding sequence
atggggggaaagcctcgacattccctgtatttcataggataccaggacgactttctgctgtatctcgatccccactactgtcaaccgacagtggacgtatctcaagctgactttcctctcgagtcatttcactgtacttccccaagaaagatggcctttgccaagatggatccttcttgtacggtcggattttacgcgggtgatagaaaagagtttgagacactgtgctctgagcttacacgagtgctgagtagtagtagcgctaccgagaggtacccaatgttcaccctagccgagggtcacgcccaggaccattccctcgatgacctctgcagccagttggcccagcctactctgagacttcctagaacaggtaggcttctgagagcgaaacgcccttcgagcgaggacttcgtgtttctgtag

SEQ ID NO: 31438 - DNA, 570 bp, synthetic construct
  source 1..570: mol_type = other DNA; note = Synthetic coding sequence
atggtgctgttgcatgttaaaaggggcgacgagtctcagttcctccttcaggcaccgggaagcaccgaacttgaagagttgaccgtccaggtcgcccgagtgtacaacggcaggttgaaagtccagcggctatgtagcgcccctaatgagaagatgaagcaggttctgaaaaaaaccatcgaggaagcaaaagccattatatccaagaaacaagtggaggccggagtgtgcgtgactatggagatggtgaaggatgcactggaccagctgaggggtgccgtcatgatcgtgtatccaatgggcctgcccccatatgatccgattagaatggagttcgaaaacaaggaggacctgagtgggacacaggctggattgaatgtaattaaggaagcagaggcccagttgtggtgggcagctaaggagcttaggcggacaaaaaaattgtccgattacgtgggtaaaaatgagaagacaaagattattgctaagatacaacaggtaagcacattctgttttaacgttagcgttgttttcgtgatatcactgcagactgacaagaacgtgcaatag

SEQ ID NO: 31439 - DNA, 2031 bp, synthetic construct
  source 1..2031: mol_type = other DNA; note = Synthetic coding sequence
atggcagcgatccagcacggtcacgaagctgtggtcaggctgctgatggagtggggagctgatcccaatcacgccgctcggactgtgggttggtccccacttatgctcgctgcactgactgggaggttgggcgtagcgcaacagcttgtggaaaagggggctaatcctgatcacttgtcagtcctagagaagacagcatttgaggttgcacttgactgtaaacacagagatctggtggactacctggatccgctgactaccgtgaggcctaaaacagacgaagagaagcgtcgccctgacatcttccacgccctaaaaatgggtaattttcaactagtgaaggaaattgccgatgaggacccaagccacgtaaatctggtgaatggtgatggggctacccccctcatgcttgcagctgtgacggggcagctggccctggtgcagctactcgtggagaggcacgccgacgttgataagcaagactctgtacacggttggactgccctgatgcaggcgacctatcacggcaacaaggagatcgtgaagtaccttcttaaccagggcgctgacgtaacactgcgagcaaagaacggctataccgccttcgacctggtcatgctcctgaacgaccccgacactgagttagtcagattgctcgcttcagtttgtatgcaagtgaacaaagacaaaggaaggcccagccatcaaccgcctctgccacacagcaaggtccggcagccctggagcattccagtgctgcccgatgataaaggtggtctcaagagttggtggaaccgcatgtcaaatagatttcgaaaactgaaactgatgcagacactccctcgcggtcttagttcgaaccaaccactccccttttctgatgagccagaaccggcattggactcaacaatgagagccgctccccaggataagaccagcaggagcgctctgcctgacgcagcccctgtgaccaaggataacgggcctgggagcacccggggagaaaaagaggacacattgctcaccacaatgctgagaaacggagctccactcaccagattgcctagcgataagctgaaagcagtgatcccacctttcttgcccccatcctcctttgagctgtggtcaagtgacagaagtcggacccggcataatgggaaagcagatcctatgaaaaccgcacttccacaacgggctagccgtggtcacccagtcgggggagggggtacagatacgacgccagttagaccagtaaaatttccctcactcccccgatcacctgcatcctctgccaatagcggcaactttaaccattccccacatagcagtggcggatcctcgggggtgggcgtatccagacatggcggtgagcttttgaatcggtcaggcggaagcatcgataatgtcctgagtcagattgcggctcagcgcaaaaaagctgcaggactcctggagcagaagccatcacaccggagcagccctgtcgggccagcaccaggatccagcccctccgaattgccggcttctcctgcaggagggagcgctcccgtaggcaagaaactggagacctccaagaggccgcctagcggcaccagcaccacgagcaagtccactagcccaactcttaccccgtcccccagccccaaaggccacacagccgagagctccgtgtccagcagctcatcccacaggcagtctaagtcgtctggcggtagcagtagtggaacaataacagacgaggatgagctaactggaattctgaagaagctgagccttgagaagtatcagcctatattcgaggaacaagaagtcgacatggaggcgtttctgaccttgactgatggtgacttgaaggaactcggtattaaaacagacggctctagacagcagatcttagctgccatctccgagctgaatgcgggaaagggacgcgagcggcagattctccaggaaactatccacaatttccatagtagttttgaatcatcagctagcaatacccgcgcacccggtaattcaccctgtgcatag

SEQ ID NO: 31440 - DNA, 2319 bp, synthetic construct
  source 1..2319: mol_type = other DNA; note = Synthetic coding sequence
atgagacatcagaagcgcaacgtgtatcactgcaataagtgcagactgcaatttctgttcgctaaggataagattgaacacaaactacagcatcataaaacattccggaaacctaagcagctggagggtctaaagcccggaaccaaggtcactattcgcgcttcccgcggacaacccagaactgtgcctgtttccagtaacgacacccctcccagcgctctgcaggaggctgcaccccttacaagtagtatggaccccctgcccgtgttcctgtatccacctgttcagagaagtatccagaaacgtgccgtaagaaaaatgagcgtgatgggacgccagacatgcctagagtgcagctttgagatccctgatttccctaaccacttcccgacttatgtacattgtagtctatgccgctactcaacttgttgttctagagcatatgcaaaccacatgatcaataatcacgtgcccaggaagtcccctaaataccttgcactgtttaagaactccgtgtcaggcatcaagcttgcctgtacctcatgcacatttgtgactagtgtcggggatgccatggccaagcacctggtgtttaaccccagccaccggagctcctcaatcctcccgcgtgggctcacatggatcgctcactccagacacggccagacacgggatagagtgcacgaccgaaacgtcaaaaacatgtatcccccaccaagttttcccactaacaaagcggctaccgtgaagtctgccggtgcgacccctgccgagccagaagaactgctcacccctcttgccccagcactgccctcacccgcttctaccgctaccccacctccaacccctactcatccacaggcactagccctccccccactcgccaccgaaggcgctgagtgtctgaacgtggatgaccaggacgagggaagccccgtaacccaggaacccgaactcgcttccggcggaggagggagtggcggagttggaaagaaggagcaactgtctgtcaagaaactccgggtcgttctgttcgccttgtgttgcaataccgagcaagcagctgaacattttaggaacccccaaaggcgaattaggcgctggctaagaaggttccaggcctctcagggagagaacttggaggggaaatatctcagcttcgaagctgaggaaaagcttgccgagtgggtactgacccagagggagcaacaactgcccgtgaacgaggagactcttttccagaaggcaactaagataggcagaagcctggaaggaggtttcaagatctcatacgagtgggccgtccgctttatgctgcgccaccatctgaccccccatgccaggagggctgttgcgcataccctgccaaaggatgttgccgaaaacgctggtctgttcatcgactttgtacagcgacagatccataaccaggacctcccgctttcgatgattgtcgccatcgacgaaatttcgctgtttctggacacagaggtactctcaagcgacgacagaaaggagaatgctctccaaacggtcggtaccggtgaaccatggtgcgacgtggttcttgcaatcctggctgatggaacggtgctgcctaccctggtattctaccggggacagatggatcagcctgcgaatatgcccgactcgatcctgctcgaggccaaagagagcggatatagtgacgatgagatcatggagctgtggtcaacacgtgtttggcaaaagcacacagcttgccaacggtccaagggcatgttggtcatggactgccacagaacccacctgagcgaggaagtgcttgcaatgctatcagcctccagcaccttgcctgctgtcgtgcctgcaggctgctctagtaagatccagcctctggatgtctgtatcaaaagaacagttaaaaattttctacacaagaagtggaaagaacaggcaagggaaatggccgacaccgcgtgcgactctgatgtgctccttcagctcgtgctggtgtggctcggagaggtgttgggagttataggggattgtcccgaattggtacaacggtcatttttagtagccagcgtccttcccggtccagacggcaatatcaatagtccaacccggaatgccgacatgcaagaggagctgattgcctctctggaagagcaattgaagttgtctggtgaacacagcgaatccagcacaccacgcccacgcagttctcctgaggagacaatcgagcccgaatcgcttcaccaacttttcgagggcgaatctgagaccgaaagtttttacggattcgaagaagccgacctggacttgatggaaatctag

SEQ ID NO: 31441 - DNA, 285 bp, synthetic construct
  source 1..285: mol_type = other DNA; note = Synthetic coding sequence
atggccatgacagccggaactactacaaccttccctatgtcaaaccacaccagagagcgcgtgaccgtcgccaagttgaccctggagaacttttactccaacctgattctgcagcacgaagagagggagacacgtcagaagaagttagaggtagccatggaggaagaggggctcgcggacgaagaaaagaagctgagaagatctcagcatgcccgaaaggaaactgaatttctccgccttaagcggaccaggctcggcttggatgacttcgagtctcttaagtag

SEQ ID NO: 31442 - DNA, 1047 bp, synthetic construct
  source 1..1047: mol_type = other DNA; note = Synthetic coding sequence
atggggaaggactattataagattctaggtattccatcaggggctaatgaggacgaaatcaagaaagcttatcgcaaaatggcactgaaataccatcccgataagaacaaggaaccgaacgctgaggagaaatttaaggaaatcgccgaagcctatgacgtgctgtccgacccaaagaagcgtggcctgtatgatcagtacggcgaggaaggccttaaaacgggagggggtacaagtgggggaagtagcggtagctttcactacacctttcacggcgatccccatgcaacatttgctagcttctttggcggatctaacccattcgacatttttttcgcgtcctcccgatcgacacgccctttttctggatttgatccagatgatatggacgtagacgaggacgaagaccccttcggtgcttttggcaggtttgggttcaatggcctcagccgcggacccagaagggcaccggaacctctgtaccctcggaggaaggtacaagatccaccggttgtccatgaactgagggtatccctggaggagatctaccatggttccacaaagaggatgaagataactcgcagacgacttaacccagatgggagaacagtgaggacggaagataagatattacacattgtgatcaaaagaggttggaaggaaggcacaaagattacttttcctaaggaaggggatgcaacgcctgacaatattcctgccgatatagtatttgtattgaaggataaaccccatgcccacttccggcgtgacggcaccaatgtgttatacagcgcactgattagtttgaaagaagctctgtgtgggtgtaccgtaaatattccaacaatagatggcagggtaatccctctaccatgcaatgatgtcatcaagcccggaacggtgaaaaggctgcggggagagggtctgcctttcccgaaagtccctacccagaggggggatttgattgttgaatttaaagtgagatttccagatcggcttactccccagacgaggcagattctgaaacagcacctcccatgcagctag

SEQ ID NO: 31443 - DNA, 888 bp, synthetic construct
  source 1..888: mol_type = other DNA; note = Synthetic coding sequence
atgcctgtccacacactatctcctggtgccccatccgctccagctctgccatgtaggctcaggactagagttcccggttatctgctgcggggacccgcagacggtggtgcacggaagccaagtgctgtagaacgactcgaagccgacaaagcaaagtacgtgaagtcgctgcatgtagcaaatacccggcaggaaccagtccagcccctcttgtccaaacaacccctgttttcacctgagacacgccgtactgtgctgactccttccagaagggcgttgcctgggccatgtagaaggccacagcttgacctggatattctatcgtcactcatagatttatgcgatagccctgtgtccccagcggaggcgagccggacaccaggccgtgccgaaggagccggacggcctcctccagccactccgcctagaccccctccctctaccagcgccgtccgtcgcgttgatgtgcgccctctgcccgcttcccctgcgagaccctgcccgagtccaggacctgctgctgccagcagtcccgcacgcccaccgggtctgcaacgctctaagtctgatctctccgagaggttttcgagggcggctgcggacttggaaagattttttaatttttgcggactcgaccccgaggaggcccgtgggctgggtgtggcgcatcttgccagggcatcgtcagacattgtatctctggcaggcccatccgcgggtcctggtagctccgagggcggttgttcccgtcgatctagcgtgaccgtcgaggagagagccagagaacgagtgccctatggtgtctcagtggtggagagaaacgcacgggtgatcaagtggctttacgggctccggcaggccagagagagtcccgcagccgaggggtag

SEQ ID NO: 31444 - DNA, 258 bp, synthetic construct
  source 1..258: mol_type = other DNA; note = Synthetic coding sequence
atgccatataacgaagccgagaataagcgtagctaccacctctgcgacttatgtgacagaataattattggcgaccgagaatgggcggctcacatcaaatccaagtcgcacctgaatcagctgaaaaaacgtcgacgactggacagcgatgcagtgaataccattgagtcgcagagcgtcagtccagaccacaacaaggagcccaaggagaaaggtagtcctggtcaaaacgatcaggagctcaaatgttccgtgtag

SEQ ID NO: 31445 - DNA, 396 bp, synthetic construct
  source 1..396: mol_type = other DNA; note = Synthetic coding sequence
atggccatgactgcagggaccactaccaccttcccaatgtctaatcatacccgggagcgggtgactgtggccaagttgaccctggaaaacttctattcaaatctgatccttcagcacgaagagcgcgagaccagacagaaaaagctggaggtggctatggaggaggaggggttagccgacgaagagaaaaagctccgtcggtctcaacacgccagaaaggagacagagttcctcaggctgaagcggacaaggctgggtctggatgattttgagtccttaaaagtcatcgggaggggcgctttcggcgaggttcggctggtccagaagaaggatacggggcacatttatgctatgaagatcttaaggaagtctgacatgctggagaaagagcagtag

SEQ ID NO: 31446 - DNA, 21 bp, synthetic construct
  source 1..21: mol_type = other DNA; note = Synthetic coding sequence
atggcacacgagatgatctag

SEQ ID NO: 31447 - DNA, 2199 bp, synthetic construct
  source 1..2199: mol_type = other DNA; note = Synthetic coding sequence
atgggattcagagacgaagcagccggatacttccataaagctgtgaaactgaaccccgacttcagcgatgcgaaagagaacttctatcgggtggctaactggctcgtcgaacggtggcattttataatgctgaatgacaccaaacgaaataccatctataacgccgcaatccagaaggccgtctgccttggctccaagtccgtacttgatatcggggctggcaccggcatcctgagcatgttcgcgaagaaggccggagcacacagtgtttacgcctgtgaattgtccaagactatgtatgagttggcgtgcgacgtggttgcggcaaacaaaatggaagctggaatcaaactcctgcacaccaaatccctggatatagaaatcccaaagcacatcccagagagggtgtccctggtagttactgaaactgtcgatgctggcttatttggcgaaggaatcgtggaaagtctgattcacgcatgggaacatctactgctccagccaaaaaccaagggagagtccgctaattgtgagaaatacggcaaagtcatccctgcctctgccgtcatcttcggcatggcagtggagtgtgccgagattcggcgtcaccatcgggtaggcatcaaagatatcgccggaatacatctgcccaccaacgtgaaattccagtctccggcttattctagtgtcgacacagaagagactattgaaccctataccaccgagaagatgtcgcgagtgcccggagggtatttagccctcactgaatgcttcgagatcatgaccgtagatttcaacaatctgcaggagctcaagagcttggctacaaaaaaacccgacaagattgggatcccagtgatcaaggagggaatcctcgatgcgataatggtgtggttcgtactgcaacttgacgacgaacattctctctctacctctccgagcgaggaaacttgctgggagcaagcagtatatcctgttcaggacctcgccgactactggataaaaccaggagaccacgttatgatggaggtgagttgccaggactgttaccttcgcatccagagtatcagcgtattgggtctcgagtgtgagatggatgtggcgaaatccttcacccagaataaagacctgctatctttgggaaatgaggctgagctgtgtagtgcacttgcaaacttacagacctccaagccagacgcagtggagcagacttgcatcctcgagtcaaccgagattgcacttctgaacaatattccctaccacgagggttttaagatggccatgagcaaagtgctgagctccctgacaccagaaaaactgtaccaaactatggacactcactgccaaaatgagatgtcatctgggaccgggcagtcaaataccgtgcagaatattttagaacccttttacgtgctggatgtctctgaaggcttcagtgtgctaccagtaattgccggtactctggggcaagtcaagccatattccagcgtagagaaggatcagcacaggattgccctggatctgattagcgaggcgaatcacttccccaaggagactctagagttttggttacggcacgtagaagatgagtcggccatgctgcagcgtcctaagtcagataaactgtggtcaataataatactcgatgtcatcgaaccgagtggactgatacagcaggagataatggagaaagccgcaatctccagatgtttattacagtcaggcggtaagatcttcccccagtacgtactcatgttcggtttgctcgtcgagtcacagaccttgctcgaggaaaatgcggttcagggtacagagcgaacgctgggtttaaatattgccccattcatcaaccagtttcaagtgcctatcagagtattcctagacctaagtagcctaccatgcattcccctgagcaagccggtggagctgctgcggctcgacctcatgactccctatttgaatacgagtaatagagaggttaaggtatatgtttgcaaatctgggcgactaacggccattcccttctggtaccatatgtacctcgacgaggaaattagattagatacaagctccgaagctagtcactggaagcaggctgcagtagttctcgataatcccatccaggttgagatgggcgaggagctcgtgctctccattcaacatcataagtcaaacgtttctatcaccgtgaaacaatag

SEQ ID NO: 31448 - DNA, 1554 bp, synthetic construct
  source 1..1554: mol_type = other DNA; note = Synthetic coding sequence
atgtgctccctggcgtccggggcaactggtgggagaggggctgtggagaacgaggaggacctgcccgagctgtcggactccggggatgaggcggcttgggaagatgaggatgatgctgacctgccacacggaaagcaacagaccccttgcttgttctgtaacaggctgtttacttcagcagaagagactttctcccactgtaagtcagaacaccagtttaatatcgactcaatggttcacaaacacggactggagttctacgggtatataaagctgattaatttcattcggctcaaaaatcccacagtggagtacatgaacagtatctataacccagtaccttgggagaaagaggagtatcttaaaccagtccttgaggacgatctgctgcttcaatttgacgtggaggacctctacgagcctgtgtcagtccctttctcatacccaaacggattgtcagaaaatacctccgtggtcgagaaattaaaacacatggaggcaagagctctctcagctgaagctgccctggctagagcccgagaagatctgcagaaaatgaagcaattcgctcaggatttcgtgatgcacaccgacgtacgaacctgttcaagctcaacaagcgtgatagccgaccttcaggaggacgaagacggagtgtattttagctcctatggtcactacggcattcacgaagagatgctaaaagacaagattagaactgaatcttacagagattttatctaccagaacccccacattttcaaggataaggttgtcctggatgtgggctgcggaaccgggatcctttctatgttcgcggcaaaagccggagctaagaaagtgctgggggttgaccaatctgaaatcttgtaccaggctatggacattattcgactgaacaagctcgaagataccataacactgatcaagggtaaaatcgaagaggtacacttacccgtcgagaaggtggacgtcattatctccgagtggatggggtatttcctcctatttgaatccatgctcgatagcgtgctctatgcaaaaaataaatatttggccaagggagggtcagtctacccggacatttgtacgattagtttagtcgcagtcagtgacgtgaataagcacgccgataggattgccttttgggacgacgtctatggatttaagatgtcttgcatgaagaaggctgtgattccagaggccgtggtcgaagtcctcgacccgaagacattgatttccgagccttgtggcattaaacacattgattgccatacgacgtcaatctccgacttggaattctctagcgattttactcttaagatcacacgcacttcaatgtgcacggctatagccggatatttcgacatctactttgagaagaattgtcacaatcgcgtcgtattctctactggaccacaatctactaagactcattggaaacagacagtttttttattggaaaagccttttagtgtgaaggctggggaagccctgaaggggaaagtgacggtccacaaaaataaacgtgaagttctcatcgtcggcatctag

SEQ ID NO: 31449 - DNA, 1560 bp, synthetic construct
  source 1..1560: mol_type = other DNA; note = Synthetic coding sequence
atggagcaggaaaaatttgatctacagaagcaacataccgaaaatattcaggagctcctggaggatacaaacgtgcgccttaataaaatggaaagcgagtatatggctcagacccagtccactaatcacatgatcaaggaactggaggctcgcgtccaacagctgactggtgaggctgagaattcaaacctgcagcggcagaagctgatccaggagaaagcagaactggaaagatgctatcaaataacatgttcagagctccaagaagtgaaagccaggcgaaatactctgcacaaagagaaagatcatctggtcaacgactacgaacaaaacatgaagttactgcaaactaagtatgatgcagacataaacctcttgaagcaggagcatgccctctctgcctccaaggccagcagtatgattgaagaactggaacaaaacgtctgccaactgaaacagcagcttcaggaatcggaacttcaacgcaagcagcagttgcgggaccaggagaataagttccagatggagaagagtcatctcaaacacatatacgaaaagaaggcacatgacttgcagagtgagctggacaaaggaaaggaggatacgcagaaaaagatccataagttcgaggaagccttgaaagaaaaggaggagcagttaacccgcgtgacagaagtgcagcgattgcaggctcaacaggccgatgcagcacttgaggagtttaaaagacaggttgagctgaactccgaaaaggtgtacgcggagatgaaggaacagatggaaaaagtggaggccgacctgacacggagcaagtccctcagagagaagcaatcaaaagaatttctctggcagctggaagatatcagacagaggtacgaacagcaaatagtggaactgaagttggagcacgagcaggaaaagacccacctattgcagcagcacaacgctgagaaggacagtctggttagagatcacgagcgcgagatcgagaacttggaaaagcagctgagggcagcaaatatggagcacgagaatcaaatccaagaatttaagaagcgagacgcccaagtgatcgccgacatggaggcccaggttcataagctgcgagaggagcttataaatgttaatagtcagcgaaagcagcagcttgtggaattagggctgttaagagaggaggaaaaacaacgcgcaacacgggaacacgaaattgtcgtgaacaagctgaaggcggagagtgaaaagatgaagatagagctgaagaagacacatgccgctgaaacagaaatgacactggagaaagtgctgcaagacgagctcgaaaacaggtctaaccaggtcaggtgtgctgaaaagaaactgcaacataaagagttggaatctcaggagcagattacatacatcagacaggaatatgagaccaagctcaagggacttatgcccgcttccctgagacaggagctggaagatacaataagtagcttgaaatcacaggtgaatttcctccagaagcgtgcgtcaatcctgcaggaggagttgactacataccagggaagaagatag

SEQ ID NO: 31450 - DNA, 1743 bp, synthetic construct
  source 1..1743: mol_type = other DNA; note = Synthetic coding sequence
atgaataatatacatgtcgaaaatgagtctctcgacaatttccttaaggaaaccaacaaggaaaacttgttggatatactgacagaacccgagaggaaacctgatccaaagctctataccaggtcaaaacccaagactgatagctacaatcagactaaaaactcattggtgcccaagcaggccctggggaaaagctccgttaacagcgccgtgctgaaagaccgcgtcaataaacaattcgtcggtgagacacagagccgcactttcccagtgaaaagccaacagctgtcccgtggcgctgatctggcgaggcctggcgtgaagccgtctcgaaccgtcccctcacatttcatccggacacttagtaaagttcagtcttcaaagaagccggtcgtcaagaatatcaaagacattaaggtcaatcggtcccagtacgagcgacccaatgaaacaaaaattagaagctatcccgtcacggagcagagggtgaagcataccaaaccccgtacatacccttctttgctgcagggggagtataataaccgacatccaaatattaagcaagaccagaagtcctcgcaggtgtgcatcccacagactagctgtgttctgcagaagtccaaagccatttcacagagaccaaatctgactgtcggaagatttaattctgctatacccagcactccttctatcagacccaacgggacatcgggaaacaaacataacaacaacggatttcagcagaaggcccagacactggatagtaaactgaaaaaggcggtgccacagaaccatttcctgaacaaaaccgcaccaaagacccaggcggacgttacgaccgttaatgggacacagactaatcccaatatcaaaaagaaagcaacggctgaggacaggcgaaaacagttggaggagtggcagaagtccaaaggcaagacatataaacgtccaccaatggaactcaagactaagcgcaaggtcattaaagagatgaatatctcattctggaaaagtatcgaaaaagaggaagaggaaaagaaggctcagctagaactcagttctaaaattaataacacattgacggagtgtcttaacctcattgaggggggtgtgcccagtaatgaaatccttaatattctatcgagcatccctgaggccgagaaattcgctaagttctggatctgcaaggccaagctgctggctagcaagggaacatttgacgtgataggattgtacgaggaggcgattaagaacggcgcaacacccattcaggagctccgcaaagtggttctgaacattcttcaagactctaacaggaccactgaggggatcacaagcgactctctcgtggccgaaacttccattacctccgttgaggagctggcaaagaagatggaaagcgtaaaaagctgtctgtctcccaaggagagagaacaggtgacagcaacacccagaattgccaaagccgaacagcacaactatcctggcatcaaattgcagatcgggcctatccccagaataaacggcatgccagaagtacaagatatgaagttcatcacacccgtgaggcggtctagcaggatcgaaagagcggtgagccggtatccagaaatgctccaggagcatgatctcgtggtggccagcttagacgagttgttggaggtggaggagactaaatgcttcatcttccggaggaacgaggcattacctgtgacacttgggtttcagacgccagagtcatag

SEQ ID NO: 31451 - DNA, 705 bp, synthetic construct
  source 1..705: mol_type = other DNA; note = Synthetic coding sequence
atgtacatggatctggtcgacggcatctttctcaatcagataatgctgcaaatcgacccgcgaccgaccaatcagagaataaataagcacgtcaacaacgatgttaacctccgcatccagaacctcacaatattggtgaggaacattaaaacatattatcaggaggttcttcagcaattaatcgtgatgaacttacccaacgtactgatgattggccgagaccccctctcaggcaagagtatggaggagattaagaaggtcctgttgctcgtattggggtgcgcagtgcagtgtgagcgcaaagaggagttcatcgagagaattaaacagctggatatagagacccaggcgggaattgttgcacatattcaggaagtcacgcacaaccaggagaatgtctttgacctacagtggctggagctgccagatgtggcccctgaggagctggaggcactttcacgcagcatggtgttgcatctcagacgactgatagaccagagggatgaatgcactgagctaattgtggaccttactcaggaacgggattacctgcaagctcaacatccaccttccccgataaaatcctcaagcgccgactcaactccctctccaacatcatccctgagctcagaagacaagcagcatcttgcagtggaactcgctgataccaaggctaggcttaggagagtgcgacaggagctatag

SEQ ID NO: 31452 - DNA, 1161 bp, synthetic construct
  source 1..1161: mol_type = other DNA; note = Synthetic coding sequence
atgactgacatacgtaagattaggttgggagagcgcttggtggaagtattttccgccgagaaagtgtacatggtacgcttgagaaacccgctcggacgccaggagtggagtgggccttggtccgagatttccgaggagtggcaacagctcacggcctctgatcggaagaatctggggttggtaatgtcagacgacggagaattttggatgagtttagaagacttttgtcggaacttccacaagctgaatgtttgtcgaaacgtcaacaatcccatctttggtcgaaaggagctggaatccgttctggggtgttggactgtcgatgacgatcctttaatgaatcggtcagggggatgttacaataatagagacacattcctgcagaatccacagtacatattcactgtccctgaagatggccataaggttattatgagtctccagcagaaagatctgcgcacatataggaggatggggcgacctgataactatataatcggattcgagctgttcaaggtggagatgaatcgtaagttccgactgcaccatttgtacatacaagaacgagccggaaccagtacgtacattgacacccgcacagtgttcttgtctaagtatctgaagaagggaaattacgtacttgtccccacgatgtttcagcatgggcgtacatctgaatttctgcttagaatattttccgaggttccagtacaattaagggagttaaccttggatatgcccaagatgtcatgctggaatctcgcccgtggataccccaaggttgttactcaaattacagtgcactctgccgaggacttagaaaaaaagtatgccaacgaaacagtaaacccctacctggtaattaaatgcggcaaggaggaagtgcgttcccccgtgcagaaaaacaccgtccacgctatttttgacacacaagccattttctataggagaacgaccgatatacccattatagtacaagtatggaacagcaggaaattctgcgaccagttcttgggccaggtgaccctggacgcagacccttctgactgcagggatctgaaatctttgtatcttagaaagaagggtggtccaacagctaaagtgaagcagggccacatctcctttaaagttatcagttccgacgatctcactgaactctag

SEQ ID NO: 31453 - DNA, 966 bp, synthetic construct
  source 1..966: mol_type = other DNA; note = Synthetic coding sequence
atgacagagctgtccctgcagaaagagcaactgcagttgaagatcattgagatcgaggacgaggcagagaagtggcagaaagagaaagaccggatcaagtctttcacaactaacgagaaggcgatattggagcaaaattttcgagatctcgtacgggatctggagaagcaaaaagaggaagtgcgagcagccctcgagcagcgggaacaggatgcagttgaccaagtgaaggtgatcatggatgctcttgacgaacgcgcaaaagtcctgcacgaggacaagcaaacgagggaacagctgcatagtatctctgattctgtcctgttcctgcaggagttcggggcacttatgtctaactattccctgcctcctcccttacctacttaccacgtcttgctggagggtgaggggctggggcagtccctcggaaacttcaaggatgacctgctgaacgtctgtatgcgccacgtcgaaaagatgtgcaaggccgacttatcccgcaattttatagagcggaatcatatggagaatggcggagatcaccggtatgtgaataactacacgaactctttcggcggagaatggtctgccccagacaccatgaaacgctattccatgtatctcacccctaagggtggagtacgcacaagctatcaaccctcatctcctgggaggttcacaaaggagacaacccagaagaatttcaacaacctctacggcacgaagggcaactacacttcccgcgtctgggaatactcttcctccatccagaactctgataacgacctgcccgtcgttcagggatcaagctcattctccctcaagggatatccatcactaatgcgaagtcaatctcctaaagcacagccccagacatggaagtcgggcaagcaaacaatgctcagtcactatcgtccattttacgtgaacaagggtaatggcattgggtcgaacgaagccccatag

SEQ ID NO: 31454 - DNA, 687 bp, synthetic construct
  source 1..687: mol_type = other DNA; note = Synthetic coding sequence
atgtatagacagagattcctctattccctctatagacacactcactgggtgaggtgcgctaagttcagccctgacggaaggctgatagtctcctgctccgaggataagacgattaagatctgggacaccacaaataagcaatgcgtaaacaacttctccgactctgtcggttttgcgaatttcgtagacttcaatccgtcagggacatgtatcgctagcgctgggagcgatcaaactgtaaaggtttgggatgtgcgtgtcaacaagttgctacagcattaccaggtacatagcgggggagtgaactgcatctcttttcatccgtctggcaattatctgataacggcctcttcagatgggacactcaaaatcctggatctactggagggacgactaatttatacgttacagggccacacaggccctgtcttcactgtcagctttagcaagggaggggaactattcgcaagtgggggtgcagatacccaagtgctgttgtggagaactaattttgatgaattgcactgcaaggggctgacaaagcggaacctgaagagactccatttcgattcccctcctcatttacttgatatctacccaaggactccccacccgcacgaagaaaaggtagaaacggtggaagacttcttcttgcacctcctcaggctgatccagagcctgcggtag

SEQ ID NO: 31455 - DNA, 1686 bp, synthetic construct
  source 1..1686: mol_type = other DNA; note = Synthetic coding sequence
atgagagccgttcgaaggcatctgtttccccagcattctgcccctggcagaggggtcgtgtgggagtggctctcagatgacggctcgtggacggcctacgaagcaagtgtttgtgattacttagaacagcaggtagccagagggaatcagctggtggatctcgctccgctcggctacaattatacagtgaactataccactcatactcagaccaataaaacgtccagcttttgcaggagtgtaagaaggcaggccggacctccctaccccgtgactacaattatagcccctcctggtcacaccggggttgcttgctcctgccatcagtgtctctctggaagccggactggtcccgtgagcggtcggtaccgccacagcatgaccaacctgcccgcataccccgtgccacaacatccgccacatcggactgctagcgtcttcggtacacaccaagccttcgctccttacaataagccgtcgttaagcggagccagaagtgcaccgagacttaatacaactaatgcatggggggctgcccctcctagtctgggcagccagccattatatagaagctccctgtcccacctggggccacaacacctcccacctggatcctcaacaagcggggcagtttccgctagtctgccttccggaccatcatcgagtcccggatccgtgcccgcaaccgttcctatgcagatgcccaaacccagtcgcgtgcagcaggctcttgccggtatgacctcagtacttatgtccgcgatcgggctgcccgtttgtctcagccgcgcacctcagcccaccagcccgcctgccagccggctagcatctaagtcacatggatctgtgaagcgactcaggaagatgtccgttaaaggggctaccccaaaaccggaacccgaacccgaacaggtgattaagaactacaccgaggagcttaaagttcccccagatgaggactgcattatttgtatggagaaactcagtacagcctccggatactcagacgtcacggactcaaaagctatcggtagcctggcggtggggcatttgactaagtgttcacatgcgttccaccttctgtgtcttctggcaatgtactgtaatggcaacaaggatggctccctgcagtgtccctcgtgtaaaacgatatatggggagaaaacaggcacccagcctcaaggtaagatggaggtgttaagatttcagatgtccctgcccggtcacgaggattgtggaactattctgatcgtctattccatcccacatggaattcagggacctgagcacccaaaccctggtaagccctttacggcaaggggtttccctcgccagtgctacctgcctgacaatgcccaaggcaggaaggtgctggaactgttgaaagtggcgtggaagaggcgcctcatttttaccgttgggacctcgtcaactacgggcgagactgatacagtagtctggaatgagatccaccataaaacagagatggatagaaacatcaccggtcatggctacccggaccctaattacttgcagaatgtgctggctgagttagccgcacaaggtgtgaccgaagattgcctggagcagcagcatgcacgcttgtggtggccacccaggtgtccaatggcaggctgggttgcaagacaggaagtcccctcccctaggggatgggaagtgtgctag

SEQ ID NO: 31456 - DNA, 2565 bp, synthetic construct
  source 1..2565: mol_type = other DNA; note = Synthetic coding sequence
atgaaggtcgaagcctgtacttgggccggatactcaggcctatacgaggcaatcgaatcttgggatttcaaaaaaatcgagaaactcgaggaatataggctgctactcaagagactgcaacctgagttcaagacccgcatcattcctaccgacatcatctcagatctgtccgaatgcctgatcaaccaagagtgcgaagaaatactccaaatttgttctacaaaggggatgatggcaggagccgaaaagttagtggagtgcctgcttcgatccgacaaagagaattggccaaaaaccctgaagctggccctggagaaagaacgaaataagttttctgagctatggatagtagagaagggcatcaaggatgtggagacggaggacctcgaggataaaatggaaacgagtgatatccagattttttatcaagaggaccctgagtgtcagaaccttagcgaaaattcctgtcctccatccgaagttagcgatacgaacctctactcccccttcaaaccgaggaattatcagttagaactggctctaccagccatgaagggcaaaaacacaattatttgtgcccctacaggctgtggaaagacattcgttagtctactcatttgtgagcatcatctaaaaaagttcccacaaggtcagaaggggaaggtggtctttttcgcaaatcaaattcccgtttacgagcagcaaaagagtgtcttcagcaaatattttgaaaggcacgggtatcgggtcacaggcattagtggagccacagctgagaatgtgccagtcgagcagatcgtcgagaacaatgacatcatcattctgactccgcagattctagtgaacaacttgaaaaagggtacaatcccctccctgtccattttcacgctaatgatcttcgatgagtgccacaacacttctaagcagcatccatacaacatgataatgtttaactaccttgaccagaaactcgggggaagttctggaccgcttccccaggttatcggactgactgcttccgtaggtgtcggagacgcaaagaatacagacgaagctctcgattacatctgtaaactgtgcgcatcgttggatgcaagcgtgattgctactgtgaagcataatctggaggaactcgagcaggtggtatataaacctcagaagtttttccgtaaagtggagtctaggatctcggacaaattcaagtacatcattgctcagctgatgcgggataccgagtccctcgccaagaggatctgtaaagacctcgagaatcttagtcagatccagaatagagaattcggaacccagaagtatgaacaatggatcgtcaccgttcaaaaagcatgtatggtgttccagatgcccgacaaggacgaagaatcgcggatttgtaaggccctgtttctgtatacctcccacttacgtaagtataacgatgcattgatcattagcgaacatgcccgaatgaaagacgcattggattatctgaaagatttcttctccaacgtgcgagcagcgggatttgatgaaatcgagcaggacctgacacagcggttcgaggaaaaactgcaagaattggaatctgtttccagggatccgtccaacgaaaaccccaaattggaagatctgtgcttcattctgcaggaagaataccatctgaaccctgagaccatcacgatcctgttcgttaagactagggcattagtagacgcattaaaaaattggatcgaaggcaaccccaagctgtctttcttgaagcccggtatcttgacgggaaggggtaaaacgaaccagaataccgggatgaccctgcctgctcagaaatgcatcctggatgcattcaaggcttcaggtgaccacaacatactaattgccacgtccgtcgcagatgaggggatagatattgcccagtgtaacctggtcattctgtacgaatacgtcggtaatgtcataaaaatgattcaaacacgaggccgaggaagggctcgaggctctaagtgcttcctcctcacatcgaacgccggagtaatcgaaaaagaacaaattaacatgtacaaagaaaaaatgatgaatgatagtatacttagactccagacctgggacgaggcagtgtttagggagaaaatccttcacatacagacccatgaaaagttcatcagggattcccaggagaagcccaagcctgtccccgacaaggaaaataaaaagttattgtgtagaaaatgcaaagcgctggcctgctacacagctgatgtgagagtgatagaggagtgtcattacacggtgctaggagatgctttcaaggagtgctttgtgtcaaggccgcatcctaaaccaaagcaattctcttcctttgagaagcgcgctaagattttttgtgcccgtcaaaactgctctcatgactggggcattcacgtgaagtacaagacctttgagatcccagtcataaaaatcgagagctttgtcgtagaggatatagcaactggagtccagacactctattccaaatggaaggactttcacttcgagaagatcccgttcgacccagcagagatgagcaaatag

SEQ ID NO: 31457 - DNA, 813 bp, synthetic construct
  source 1..813: mol_type = other DNA; note = Synthetic coding sequence
atgcagatcgagcatataattgaaaatatcgtggctgtaaccaaggggctcagtgaaaagttgccagagaagtgggagagtgtgaagttacttttcgtcaaaactgaaaagagtgccgctctgcccatcttttcttcattcgtctcaaactgggacgaagcaacaaagcgatcactgttgaataaaaagaagaaggaggctaggaggaagaggcgggagagaaatttcgagaagcaaaaggagcggaagaagaagcgacagcaggctagaaaaacagcctccgtgctgtccaaagacgatgtggctcctgagagcggcgatacaaccgtaaaaaagcccgaaagtaagaaagaacagaccccagagcacggcaagaaaaagcggggaagaggcaaggctcaggtgaaagccaccaatgagtctgaagacgagatcccccaactggtccctattggaaagaagacaccagcaaatgaaaaagttgagattcaaaagcatgccaccgggaagaagtctcctgcaaaatcacccaacccatctactccgaggggtaagaagcgcaaagccctgcctgcaagtgagacaccaaaggccgcagagtccgagacgccgggaaagtcaccggagaagaaacctaagattaaagaggaggccgtcaaggaaaagtctccttccctgggcaagaaggacgccaggcagacacccaagaaacccgaggccaaattctttactaccccctcgaaatccgtgagaaaggccagccacactcctaagaagtggcccaaaaagccaaaggttccccagtcaacgtag

SEQ ID NO: 31458 - DNA, 1059 bp, synthetic construct
  source 1..1059: mol_type = other DNA; note = Synthetic coding sequence
atgtcctctagaaagcttagcgggcctaagggtcggcgtctctcaatccatgttgtgacttggaacgtggcctctgccgcaccccctctagacttgtccgacctgctgcaactgaacaatcgtaatctgaacctcgatatatatgtgattggtcttcaggaactgaatagtggaatcatcagcctcctttctgatgccgcttttaatgacagttggtcatcatttctgatggacgtcctttcaccactgtctttcattaaggtctcccacgtgcgtatgcagggtattctgctgctggtgtttgctaagtatcagcaccttccctacattcagatcctctctactaagtctacgccaactggcttgtttgggtactggcttagtattgccaagaagcacgatccactgttgagggaatttcaggagggcaggcttcttttcccaccaacatacaagttcgaccgtaatagcaatgactacgatactagcgagaagaagcgaaagcccgcatggaccgaccgcatcctttggagactcaaacggcagccctgcgccggacctgacactcccatccctcccgcaagccacttttctctgtccctaaggggctatagttcgcacatgacatacggcatcagtgaccataaacccgtgtccggcactttcgacctggaactcaagccgttggtctcagcaccactcatagtactgatgcccgaggacctttggacagtggaaaacgacatgatggtatcatatagcagcaccagtgattttccctcgagcccctgggactggattggcctgtacaaagtcggtttgcgggacgttaatgactatgtcagctacgcatgggttggggactctaaggtgagctgctcagacaacctcaaccaggtttacatagatatatccaacattcctacaacggaggatgaatttctgctctgttactattcaaatagtttaaggtccgtcgtgggcatcagtaggcccttccagatcccccctggtagtctgcgcgaggatcccctgggtgaagctcaaccccagatttag

SEQ ID NO: 31459 - DNA, 375 bp, synthetic construct
  source 1..375: mol_type = other DNA; note = Synthetic coding sequence
atgaccggatcatgttgtggttccacctttagcagtctgtcttatggcggaggatgctgtcagccatgttgttgcagagatccgtgctgctgccgcccagtgacatgtcagacgaccgtgtgtcggcctgttacatgcgtgcctcggtgtacacggccaatttgtgaaccatgtcgtcgtccagtgtgctgcgacccctgctcgttgcaggagggttgctgtaggccaattacttgttgcccctccagctgcacggcagttgtgtgcagaccttgctgctgggcaacgacttgttgtcagccacccgtcagtgtgcagtcgccttgtggccagcctaccccttgcagcacaacctgtcgcaccagcagttgttag

SEQ ID NO: 31460 - DNA, 927 bp, synthetic construct
  source 1..927: mol_type = other DNA; note = Synthetic coding sequence
atgaaacgtgcacatccagagtatagctcgtccgatagcgagctggacgagacaatagaagtggaaaaagagagcgcagacgagaatggaaacctgagttccgccctcgggagcatgtcgcctaccacatctagtcagatcctggcaagaaaaagacggagaggaatcattgaaaagcgcagacgcgaccgcatcaataattcactcagcgagctccgcagactggtgccaagcgcattcgagaagcaggtgatggaacagggatctgccaaactggaaaaagcggagatcctgcaaatgaccgttgaccacctgaaaatgcttcacaccgcaggcggaaaaggatacttcgacgcccacgcgctcgccatggactaccggagtcttggatttcgcgaatgccttgccgaggtggcccgatacctcagcatcatcgagggcctcgacgcctccgaccctctcagagtgaggctggtgtcccacttaaacaattatgcatctcagcgggaagctgctagtggagcacacgctggcctaggtcacattccatgggggacagtattcggccatcatcctcacatagcacacccactgctgctgccccagaatggccacggcaacgctggtaccaccgcaagccctaccgaacctcaccaccaggggcgtttgggaagcgcacatcccgaagccccagctctccgcgctcctccctctggcagccttggaccggttctgcctgttgtgacaagtgcctctaaactgagccctcctctgttgtcctcagtcgcctccttgtccgcctttccgttttcttttggaagctttcacctgctctcccctaatgccttgtctccttcagccccaacccaggccgcaaatctggggaaaccctaccgtccatggggcaccgagataggagccttctag

SEQ ID NO: 31461 - DNA, 2943 bp, synthetic construct
  source 1..2943: mol_type = other DNA; note = Synthetic coding sequence
atgacagagggaaggcactgtcaggtccacctgttggatgataggagacttgagttgttagttcagcctaaattgctggcacgtgaacttctggacttggtggcttcacattttaatttgaaagaaaaagagtacttcgggattacctttatcgatgacaccggacagcagaactggctgcagttggaccaccgggtgctggaccatgatctgcctaaaaagccaggccctaccatcttacacttcgccgtgaggttttacatcgaaagcatatcatttctcaaggacaagaccaccgttgagctgtttttcctcaacgccaaagcttgcgtgcacaaggggcagatagaagtggagagcgagacaattttcaaacttgccgctttcattttgcagtcgccaaaggtgagcctcactcacgatgagaatgcacggaaagacttgaaaaccctgcctgcgttcccaaccaaaacactgcaggaacaccctagtctagcatactgtgaagaccgggtgattgaacactacctcaaaatcaaggggctgaccagggggcaggccgttgtccagtacatgaagatcgtggaggcccttcctacttatggcgtgcattattatgcagttaaagacaagcagggcctgccctggtggctaggtatctcatacaagggtatcggacagtacgacatacaggataaagtgaaacccagaaagctgtttcagtggaaacagttggaaaacttatatttcagggaaaaaaagtttgccgttgaagtgcacgatcctaggcggatcagtgtatcccggaggactttcggtcagtcagggctgttcgttcaaacctggtacgccaattctagcctgataaaaagcatctgggtgatggcaattagccagcatcaattctaccttgacagaaagcagtccaaggccaaaataccctctgctcgctcactggatgagattgctatggatctgactgagacagggacccagcgggcatcgaaactcgtaacactggagactaagtcacaattcatcatggcgtcgaatggtagtttaatctcctcaggttcgcaagacagtgaggttagcgaggagcagaagcgggagaaaatactcgaactcaagaagaaggagaaactgcttcaggaaaagctgctgaagaaagttgaagagctgaagaagatatgtcttcgcgaagctgaactgactggaaagatgccgaaggagtaccctctcaatatcggggaaaagccaccccaggttagacggagagtgggcaccgcgtttaagctggacgacaacctgctgccctcagaagaggatcctgcactgcaggaattggagagcaactttctcatccagcagaaactggtggaggccgcaaagaagctggctaacgagccagatctgtgcaagactgtcaagaaaaagcggaagcaagactacaccgatgcaatgaagaagctacaagagattgaaaacgcgatcaacgagtataggatccgctgtggaaaaaaacccagtcagaaggctaccgttcttcctgaagacattataccgagcgaaagcagcagtctgtccgatacaacaacgtatgacgacccttctgatgcttttacatttcctgggcagaggagcagttctgtgcctcacagtcctaggattctgcctcccaaatccctcggcatcgagcgtattcattttcggaaatccagcattaatgaacagttcgtcgatacacggcagagcagagagatgctctccactcacagcagcccatataagacgttggagcgcaggccccaaggcggaagaagtatgcccacgaccccagtattgacaagaaacgcttactcttccagtcatctggaacctgaatcttcttctcagcactgcaggcagcgttctggctccctggaatcacagagccacctgctgagtgaaatggacagtgacaagccttttttctctctctccaagagccagagatcatccagtaccgagatcctggacgatggctcctcctatacaagccagagctctacagagtactattgcgtcactccagtcactggcccatactatacgacccagaccctggatactcgaacccggggaagacggcgtagtaagaagcagaacgtgtccacttccaacagtggatctatgcccaacctagcccagaaagacagccttaggaatggagtttattcgaagagccaggagcctccatcctcaagctattacatcgcaggttacacaccttatgcggaatgtgacttctactattctggaggctacgtgtacgagaacgacacggaaggccagtattcagtaaatccaagctatcggtcctctgcccattacgggtacgagcgccagagggactacagtagatcattccacgaggacgaggtggaccgggtcccacataatccatatgccacactaaggttgccccgaaaggctgctgctaaatcagagcacattacaaagaacattcacaaagctcttgtcgcagaacacctgcgaggctggtatcaacgcgctagcggccagaaagaccagggtcattcaccgcagacgtcattcgactcagaccggggatcccagcggtgcctggggtttgccggacttcaggtaccctgtagtcctagctcaagagctagttcctattcaagcgtcagctcaaccaacgccagcgggaattggcgcactcagctgaccattggtctgtcagattacgaaacccctgcccacagtagctacactagttgttatggaaacgtctacaaccctctcccctctccttccagacagtacacagaaattagtcagctggacggcaccgacggcaatcaactagaggacaatctggagtcatcggagcagcggcttttctggcatgaggactctaagcccggaactctcgtgtag

SEQ ID NO: 31462 - DNA, 2979 bp, synthetic construct
  source 1..2979: mol_type = other DNA; note = Synthetic coding sequence
atgtacggcagcgcccgaagtgtaggcaaagttgaaccttccagtcagtctcccggtaggtctcccagactccctaggtcacccagattaggacatcggagaaccaattccacaggaggctccagcgggtcctcagtggggggtgggtccgggaagaccttgagtatggagaacattcagtctctgaatgcagcatacgccacctccggccctatgtatctatccgatcacgagaatgttggaagcgagacgcctaagagtacaatgacgctcgggcgaagtgggggtaggctaccctatggggtccgaatgacggctatgggcagttctcctaacatcgcctctagcggcgtggcctccgatacaatcgctttcggcgagcatcatctgcccccagtatctatggcttcaaccgtcccgcattccctgcgccaagcacgggataataccatcatggacctgcagactcaattgaaggaggtccttcgggagaacgacttactgaggaaagatgttgaggttaaggagagcaagctgagcagtagtatgaacagtatcaagacgttttggtcgccagagctcaagaaggagcgggcactcaggaaggatgaggccagcaagatcaccatttggaaggaacagtaccgagtcgtgcaggaggagaatcaacacatgcaaatgaccatccaagctctccaggatgagctacgaatccagagagacctcaatcagttatttcagcaggactcctccagccgaacaggcgagccatgtgtggcggaactcacagaggagaacttccagagactccacgccgaacacgaacgccaagcaaaagagctgtttctgctcagaaaaaccctggaggaaatggagctgcggattgaaacccagaagcagacactcaacgccagggatgaatccataaagaagttgctggagatgctgcagtctaagggactatccgcaaaggccacagaggaggatcacgagagaaccaggcgactggctgaggccgaaatgcacgttcaccatctggagagtctgctagaacagaaggaaaaagagaatagcatgctgcgagaggagatgcacaggcggttcgaaaatgccccagatagcgccaagactaaggcactgcagacagtgatcgagatgaaagattcaaaaatttcttccatggagagggggctgcgggatttagaggaggaaattcaaatgttaaaatctaacggagcactgtcaacagaggagcgggaagaagagatgaagcagatggaggtatataggagccacagcaagttcatgaagaataaaatcggacaagttaagcaggaattatcacgaaaagacacagagcttctggccttgcaaacaaagctagagaccctcactaaccagttcagtgattcgaagcagcatatagaagtcttgaaggagagtctgactgctaaagagcagcgagcagctatactgcagacagaggttgatgctctgcgattacgacttgaagagaaagagactatgctgaacaagaagacaaagcagatccaggacatggctgaagagaaaggtacacaggctggcgagattcacgacctcaaggatatgcttgacgttaaggagagaaaggtgaatgttctccagaagaaaatagagaatctgcaggaacaactgcgtgacaaggagaagcaaatgagttcattgaaagagagagttaaaagtttgcaagccgacaccactaataccgacactgctctaaccaccctggaagaagctttggctgagaaagagaggaccattgagcggcttaaggaacaacgcgaccgcgatgagagagagaagcaggaggagatcgataactataagaaggacctgaaagacctaaaagagaaagtctcactgctgcagggagacttgtctgaaaaggaggcctcccttctggatttgaaggagcacgcatcatcactggcatcttcaggcctgaagaaggactctcgacttaagacactcgaaattgccctggagcagaagaaggaagagtgtctcaagatggaatcccagctgaaaaaggctcacgaagcggcactggaagcacgcgcaagccccgaaatgtccgaccgaatccaacatctggagagagagataactcggtataaagacgaaagctcaaaagctcaggccgaagtagacagactccttgaaatcctgaaagaagttgaaaatgaaaaaaatgacaaagataaaaaaattgccgaactggagagcctgacctccagacaagtaaaggaccaaaacaagaaggtggcgaacctcaagcataaggaacaggtagagaaaaagaagagcgcgcagatgctggaagaagcccgaagacgcgaggataacctgaatgattcttcacagcaactgcaggactcactgcggaagaaggatgatagaatagaagagctggaggaagcccttcgcgagtcagtgcagatcactgccgaaagagagatggttctggcccaggaagaaagtgcgagaactaacgcggaaaaacaggtcgaagagctgctgatggcaatggagaaggtgaagcaggaactggaatcgatgaaagccaagctgtcgagtacccagcaatcactcgcagagaaagaaacccacctcacaaacctcagagctgagcgcagaaagcatctcgaagaggtcctggagatgaaacaggaggctctgttggcagctatttccgaaaaagatgccaatatcgccttactagaactgagctccagtaaaaaaaagactcaagaggaagtggcagcgctcaaaagggaaaaagacagactcgtccagcagctgaaacagcagacccaaaaccggatgaagctaatggctgataactatgaagatgaccacttcaagtcatctcactcgaaccaaacgaaccataagcctagccccgatcaggacgaggaggaaggcatctgggcttag

SEQ ID NO: 31463 - DNA, 3138 bp, synthetic construct
  source 1..3138: mol_type = other DNA; note = Synthetic coding sequence
atgctgactgtgcaagtgaagacctcaagcgcaattgagctacctgacagcctggccttcctgtggattatcccaatgtggtactgcgaaggaaaggaattggaaaattctccagacattcacattgtacaggccggaaatcttcattccctgactattgcggaggcgtttgaggaggatacaggcagatatagttgcttcgccagcaacatatatggaacagactcgacttccgctgaaatctacattgagggcgtaagcagcagtgactctgaaggggaccccaataaagaggagatgaatagaatccagaagccgaatgaggtctcaagcccaccaacaacgtcagcggtgatacccccagcagtgcctcaggcgcaacatctggttgctcagcctcgggttgccaccatccagcagtgccagagcccaacaaattatttgcagggtctggatgggaaacctatcatcgctgcgcctgtctttacaaaaatgctgcagaacctgtctgcctctgagggacagcttgttgtcttcgaatgccgtgtgaagggggctccatcgcctaaagtggagtggtaccgcgaggggactttgatcgaagactcacctgacttccgcattctgcagaagcgaccagtgtgtatggagcacatagaagagatttgtacactggtgatcgcagaggttttcgccgaggactcgggctgtttcacctgcaccgcctctaataaatacggtactgtttctagcatcgcacagcttcacgttcgtggaaacgaggacctgtctaataatggcagcctgcatagcgctaatagtactaccaacctggcggcaattgagccgcaaccttcacctccacattcggaaccgccatcagttgaacagcctcctaaacccaagctggaaggcgtcctggtgaatcataatgagcccagatcctcaagtagaataggtctgcgggtacactttaacctgccggaggatgacaaaggctcagaagcctcttcggaggcgggagtggtgacgacacgtcaaaccaggcctgatagtttccaggaacggttcaatggtcaagcaactaagacccccgagccgtcaagccctgttaaggaacccccaccagtactggccaaacccaaactggactccacccagcttcagcagctccataatcaggtattactggaacagcatcagctgcagaatcctccgccttcaagcccaaaagaatttcccttctccatgactgttctgaacagcaatgcccctccagccgttaccacctctagcaaacaggtcaaagccccaagttctcagacattctctttggctaggcctaagtatttttttccatctactaacactaccgcagctacggtcgcaccctcttcatctcctgtgtttaccctgtctagcactccacagactattcagcggacggtaagcaaggagtctctgctggtttctcacccctcagtccagaccaagagtcctggtggcctatctatccagaacgagcctcttcctcctggcccaacggaaccgaccccaccccctttcactttctcaatccccagtggcaaccagttccagcccaggtgcgtcagtcccatccctgtgtctcctacaagtcggattcagaaccctgtagcttttctatcttccgtcctgccctccctacctgctattccacccactaacgccatggggcttcccagaagcgctccttcgatgccaagccagggactggccaagaaaaatacaaagtctccccagccagtcaatgatgataacatccgagaaactaaaaacgcggtcataagggacctcggaaagaagataaccttcagcgacgtcaggccaaatcagcaggagtacaaaatatccagtttcgagcagagattaatgaatgaaatcgagttcaggctggaacgcaccccggtcgatgagtccgacgacgaaattcagcacgacgagattcccacaggcaaatgcattgcacctatctttgataagcgtctgaagcatttccgggtcacagaggggtcacctgtgacctttacttgcaagatcgtgggcattcccgtgccgaaagtgtactggtttaaagacggaaagcagatcagcaaacgcaacgagcattgtaaaatgcgcagagaaggagacggcacctgctctttgcatatagaaagtactacttcagacgacgatggcaattataccattatggcagccaatccacaaggcagaatcagctgctccggccatctgatggttcagtccctgcctattcgctcaagactgacgagtgccggtcagtcacaccggggacggtctcgtgtgcaggagagagacaaggagccactccaagaacgcttcttcaggccccactttctgcaggcccctggcgacatggttgctcatgaaggccgactctgccgcctcgattgtaaggtgtcaggcctccctccaccggagttaacttggctcctgaacgggcagcccgtgctgccagatgcgtcacataaaatgctggtgagggaaacgggggtgcactccctgctcatcgaccccctcacgcaacgagacgcaggcacttacaaatgcattgcgaccaacaaaaccggccagaacagcttttctttagagttaagcgtcgtcgctaaggaggttaaaaaggcccctgtgatactcgaaaagctgcagaactgcggcgttcctgaaggtcatccagtacgtctagaatgtcgtgtgatcggtatgccccctccagttttctattggaaaaaagacaacgagactatcccatgcactcgtgagcgcattagtatgcaccaggatacaacagggtatgcctgcctgctaattcagcctgccaaaaagagcgatgcgggatggtatactttatctgctaaaaacgaggccggtatcgtcagttgcacggcccgactcgacatttacgcccagtggcatcatcagattcccccacctatgtctgtgagaccaagtggctcacgatatggctctctgacctccaaaggactggacatcttttcggccttcagcagcatggaatccaccatggtctattcatgttctagcagatccgtggtcgaatcagatgaactttag

SEQ ID NO: 31464 - DNA, 72 bp, synthetic construct
  source 1..72: mol_type = other DNA; note = Synthetic coding sequence
gtgcgactggcctggggtttcgtgagcgctttaggctcattccacacggctgacccagaaggggctgcctag

SEQ ID NO: 31465 - DNA, 1608 bp, synthetic construct
  source 1..1608: mol_type = other DNA; note = Synthetic coding sequence
atggaggcccctaccgtggagacacctcccgatccctctcccccatccgctcccgctcccgcattggtgcctttgcgcgcaccagacgtagctagactgcgggaggaacaggagaaagtcgtcacaaactgccaagagcggatccagcactggaaaaaagttgataacgattataatgctctgcgcgagcggcttagcaccctgcctgataagctctcttataatatcatggtgccttttggaccttttgcctttatgcccggtaagcttgtacacactaacgaagtgacagtattacttggcgataactggttcgccaagtgctcagctaagcaggccgtgggccttgttgaacaccgtaaggaacacgttcgcaaaactatcgacgacctcaagaaggtgatgaaaaacttcgagtctcgcgtggaatttactgaggatcttcagaaaatgtctgatgccgctggtgacatcgtggacatacgggaggaaattaagtgtgattttgagttcaaagcaaaacatcgcatcgcccacaagccccatagtaagccgaagacgtccgatatatttgaggccgacatcgctaatgatgtgaagtctaaagacctgctggccgacaaggagctgtgggcaaggctggaagagctggaacgccaggaggagcttctcggcgaactagatagtaaacctgacactgtgattgccaatggagaggatactactagcagtgaggaagagaaggaggaccgaaacactaacgtgaatgctatgcaccaggtaacagattctcatactccctgtcacaaagacgtggcctcatctgaaccctttagcggtcaggtaaatagccaactcaattgctccgttaacggatcatctagttaccacagcgatgatgatgacgacgatgacgatgacgacgacgacgataatatcgacgacgacgatggcgacaacgatcatgaagctttgggagtgggtgataacagcatcccgaccatttatttctcacacaccgtggaaccaaagcgagtcagaataaacaccggcaagaacacaacgctgaagtttagcgaaaagaaagaggaagctaaaagaaaacggaaaaattcaacaggatctggacactctgctcaggagctccccactatcagaaccccagccgatatataccgggctttcgtagacgttgttaacggagagtatgtgccgagaaaatccatcctgaagagccgcagccgggagaacagtgtttgctctgacacctctgagagttccgccgctgaatttgatgatcggcgtggagtgcttcgcagtatctcatgtgaagaagcaacatgttctgacacctccgagtccattctggaggaggagccccaggaaaaccagaagaagctactcccactctccgtaactccagaagcattttccgggaccgttatcgagaaagagttcgtgtccccatccctcactcctccacccgcaatcgcgcatcccgctctcccaaccatacctgagagaaaagaggtactgttggaggcctcagaagaaacaggcaagcgggtgtctaagttcaaggccgcacggctacagcaaaaggactag

SEQ ID NO: 31466 - DNA, 1731 bp, synthetic construct
  source 1..1731: mol_type = other DNA; note = Synthetic coding sequence
atggaagggctgcgcagaagacgcggaagagaagccggtcctcctcagcccatggttccgctagcggttgagaaccaggcagggggagagggagccggaggagaattggggatctccctgaatatgtgtctgctgggagctttggtcctcctggggctgggcgtccttttgttttccggcggactgtcagaaagtgagaccggcccaatggaggaggttgagaggcaggtgttacccgatccagaggttttagaagcagtaggagaccgacaggacggcctcagggaacagcttcaagccccagtgcccccagattctgtgcctagcctgcagaacatgggcttgctgctcgacaagctggctaaggagaaccaagacatccgcctgttacaggcacaactgcaagctcagaaggaggagctgcaatcactcatgcaccaacctaaaggactggaagaggaaaacgcacagctccgcggagctctccaacagggagaggcattccagagagctctggagagtgaattgcaacagcttcgggctagactgcagggccttgaggccgattgcgttagggggccagacggcgtatgcttaagcggaggccgagggccacagggagacaaggctatccgggagcagggtcccagagagcaagagcccgagctgtcattcctgaaacaaaaggaacagctggaggctgaagcccaggcactgagacaagaacttgagcgacagaggcgcttgttggggtccgttcagcaggacctcgaaagatccctgcaagacgcgagtaggggagatcccgctcacgctgggctggccgaactcggccacagactggctcagaagctccaggggcttgagaattggggacaggacccaggcgtgagtgcgaacgcatcaaaggcctggcatcagaagagccatttccagaactctagagaatggtctggaaaagaaaagtggtgggatggacaacgtgacagaaaggccgagcactggaaacacaagaaggaggagtcagggagagagaggaagaaaaattggggcggtcaggaagacagggagcccgctggcagatggaaggaaggcagacctagggtcgaagaaagcgggagcaaaaaggaagggaagcgccagggtccaaaagaacctccgagaaaatctgggagctttcattcctctggagaaaagcagaagcagccacggtggagagagggtaccaaggattctcatgaccccctgccctcgtgggcggaacttctgaggcctaagtatagagctcctcagggatgctcaggggtggacgagtgcgcaagacaggagggtctcacgttctttggcacagagctagcaccagtgcgccagcaagaacttgcctcccttctgcggacatacctggcgaggttaccctgggcaggacaactcaccaaggagctgccgttgtccccagcttttttcggcgaggacggcatctttcgccatgatagactgcggtttagggacttcgtagacgcgcttgaggacagtctggaggaagtcgcggtccaacagaccggcgacgatgacgaggtcgacgactttgaagatttcatctttagccactttttcggggacaaagcgctcaagaagcggtcaggaaaaaaggataagcatagccagtccccacgagccgcaggccctagggagggccactctcactcacaccatcaccatcacaggggatag

SEQ ID NO: 31467 - DNA, 2244 bp, synthetic construct
  source 1..2244: mol_type = other DNA; note = Synthetic coding sequence
atggctaagtataacactgggggaaaccctacggaggacgttagcgtcaacagtcgtccctttcgggtaaccggccctaattcttcctctgggattcaggcacgaaaaaatctattcaacaaccagggaaacgcctctcctccagccggacctagcaatgtgcctaagttcggaagtccgaaacctccagtagcagtcaagcccagcagcgaggagaagccagataaagagcctaagcccccattcctgaagcccacaggtgccggtcagcgttttggtactccagcaagcttgaccacccgtgatcctgaagccaaagttgggttcctgaagcctgtgggtccaaaaccaatcaaccttcctaaggaggactctaaacccacgttcccttggcccccaggtaataaaccatcgctccatagcgtaaatcaggaccacgatctcaagccgcttgggcctaaaagcggaccaacccctcccacaagcgaaaacgagcagaaacaggccttccctaaactcaccggcgtgaagggcaagttcatgtccgctagccaagaccttgaaccaaaacccctgttccctaaacctgcctttgggcagaaaccaccgctatcaactgagaatagccacgaggatgagtctcctatgaaaaatgtaagtagctctaagggaagcccagctccgcttggagtgcggagcaaatctgggcctctcaagcccgctagggaagattccgagaataaggaccatgctggagagatatcctccctgccttttcctggggtggttcttaagcccgcagcttccagaggcggacccggacttagcaagaatggagaagagaaaaaggaggatcggaaaatcgacgccgcaaaaaatactttccagtccaagatcaatcaagaagagcttgcctcgggaacgcctccagctcggtttcccaaggcccctagtaaactgactgtcggaggaccgtggggacagtcccaggaaaaagagaaaggagacaaaaatagcgctaccccgaagcagaagccattgccccctctgtttacgctcggcccacccccacctaagccaaaccgcccacccaacgtggatctcactaagtttcacaaaacctcttccgggaatagcaccagtaagggccagacaagttactcaacgacttctcttcctccccctcccccatcccaccccgcatcccagcccccactgcccgcaagtcatccatcgcaacctcctgtgccttccttgccccctcggaatataaaacctccgttcgatctaaagtccccggtgaacgaggacaatcaggacggcgtcactcactctgacgttgtgattccattagaccacgagcaagattccgaaggagagacgtacgaagatattgaggcctcaaaggaacgcgagaaaaaaagagagaaagaggagaagaaaagattggaactggagaaaaaagagcagaaggagaaggaaaaaaaggagcaagagataaagaagaaatttaaattaaccggccctattcaggtgatacacctggctaaggcctgttgcgacgtgaagggagggaaaaatgagctgagtttcaagcagggggagcagatcgaaatcatccgcattaccgataacccggaaggcaagtggctgggtaggacggctcgagggtcctacggctacatcaaaaccaccgctgtcgagatagattatgactccttgaagcttaagaaggatagcctgggtgcaccatcacgccctatcgaggacgaccaagaggtgtatgacgatgtcgctgagcaagatgacatttccagtcacagccagagcgggagcgggggtatcttcccccctcccccagatgacgatatttacgacggcatcgaagaggaagatgccgacgacgggagcacactgcaggtgcaggaaaaaagcaatacgtggagctggggtatccttaaaatgctgaaggggaaagacgatcgcaagaaaagcatcagagaaaagcccaaggtgagcgacagcgacaacaacgaggggtcatccttccccgcaccacctaaacaactcgacatgggcgacgaggtatacgacgatgtagatacctccgatttccctgtgtcctcagctgaaatgtcacagggcaccaacgtcgggaaggcaaaaactgaggaaaaagacctcaaaaaattgaagaaacaggaaaaagaggagaaggactttcgcaagaagtttaaaaagtag

SEQ ID NO: 31468 - DNA, 1566 bp, synthetic construct
  source 1..1566: mol_type = other DNA; note = Synthetic coding sequence
atgacctcagcttttaaactggattttctgccagacatgatggtggaaggtcgcttgttggtgccggatcgcattaacgggactgcaaataagatgaacggggcattggatcattctgaccagccagaccctgacgcgataaaaatgttcgtcggacagatacctcgttcctggagcgagaaagaactgaaggaactgttcgaaccctacggggcagtctaccagattaacgtattgagagatagatcccagaatccccctcagagcaaaggttgttgttttgtaaccttttacacccgcaaagccgctcttgaagctcagaatgctctccataatatcaaaaccttgcccggaatgcaccaccccattcagatgaagccagccgatagtgaaaagtctaatgccgtggaggatcgcaaacttttcatcgggatggtgtccaaaaaatgcaacgagaacgacatcagggtcatgttcagtcccttcggtcaaatcgaagaatgcagaatcttgcggggtccagacggtttgagccgcggatgtgccttcgttaccttctcaacaagggccatggcacaaaacgccatcaaggctatgcaccagagccagactatggaaggatgcagcagccccattgtagttaagtttgctgacacccagaaagataaggagcagcggagactccagcagcagttggcccagcagatgcagcaactcaataccgctacctgggggaatctgacagggctcggaggtctgactccacagtacttggccctgctgcaacaggccacctcctccagcaatctgggagctttttctggaatacagcagatggctggaatgaacgcacttcagctgcagaatctggcaacgctcgctgccgcagctgcagctgcgcaaacttctgccacatccaccaatgccaatccattgtccactacaagttccgctctaggggctttaacgtcacctgtcgcagcgagcactcctaactctacagcgggagctgcaatgaactccctgactagcctgggcaccctgcaaggtctagccggagctacagtcggacttaataatattaatgctctcgccgtcgcgcagatgctctcaggaatggctgcactgaacggagggctgggcgctacggggctgactaatggaacggcgggtaccatggatgccttgacacaggcttatagcggcattcagcaatacgccgcagccgcacttcctacactttactcacagtctcttctccagcagcagtcggccgcaggaagccagaaggagggccctgagggtgcaaatttgttcatataccatctgccacaggagttcggtgaccaagatattctgcagatgttcatgcccttcggcaacgtaatcagtgcaaaggtcttcatcgacaaacaaacaaatcttagcaagtgtttcggcttcgtgtcttacgacaatcccgtcagtgcccaggccgcaatccaagccatgaatggattccaaattggcatgaagagactgaaggttcaactcaaaagatccaagaatgattccaaaccatactag

SEQ ID NO: 31469 - DNA, 1710 bp, synthetic construct
  source 1..1710: mol_type = other DNA; note = Synthetic coding sequence
atgcttcgggatatgactggactgcctcacaatcgaaagtgctttgactgtgaccagcggggtccaacgtacgtaaacatgacggttggttcctttgtatgtacgagttgctccggatccttgcgagggttaaatccgcctcatagggtgaaaagcatctctatgaccacattcacccagcaagaaatcgagttcctacagaaacatggcaatgaggtttgtaaacagatctggctgggcctcttcgacgatcgaagttccgccatacccgatttccgcgacccgcagaaagtgaaggaatttctgcaggaaaagtatgaaaaaaaacgatggtatgtgccccctgagcaagccaaggtggtggccagtgtgcacgcgagcatatcgggctcctctgcttcctctacaagcagcactccagaggtgaaacctctgaagtcattgctgggagattccgctcccacactgcatctgaacaaggggactccgtcacagagcccggtagtaggacgatctcagggccaacaacaggagaagaagcagttcgacttactgagcgacttgggatcggacatttttgccgctcctgcacctcagagtacagctaccgccaatttcgcaaattttgcacacttcaactcccatgctgctcagaactccgctaacgcagattttgctaattttgacgctttcggacagtccagcggaagctccaactttggcggattccccaccgccagccacagccccttccagccacagactaccgcattcaggatgctcagctccagctgctcttttggcgaatttacatccgcctttcctctgcaagccacacactctggttccgccgcttcggtgaatgctaacttcgctcattttgacaatttcccaaaaagttcctccgccgatttcggcacatttaacaccagtcagtcacatcagactgcatcagctgtcagcaaagtgtcaaccaacaaggccggactgcagaccgcagacaaatacgccgctctggccaacctggacaacattttcagcgctggccagggtggtgatcaagggtccggcttcgggacaactggaaaagcgccagtaggaagtgttgtatcggtgccatcgcagtcgagtgcgagtagtgacaagtacgctgcattggccgagctcgactctgtgttctccagtgccgcaacatcctctaatgcctatacttctaccagtaatgcctcgtccaacgtctttggtactgtgcctgtcgttgcatcagcacagacccagcccgcatcatccagcgtcccggctccatttggcgcaacccccagtactaaccccttcgtcgccgcagcaggcccaagcgtcgcatccagcacaaaccccttccaaacaaatgctcgcggagccacagctgccaccttcgggaccgcctcaatgtcaatgccaaccggttttggcaccccagctccgtatagccttcccacatctttcagcgggagtttccaacaacccgcatttcccgctcaggcagcctttccacaacagaccgcttttagccagcaacctaatgggtttgcggcattcggacagacgaaacccgtcgttactcccttcgggcaggtagccgcagcgggagtttcctcaaaccctttcatgacaggggctcctaccggtcagttccctactggtagttcttccactaacccgtttctgtag

SEQ ID NO: 31470 - DNA, 2007 bp, synthetic construct
  source 1..2007: mol_type = other DNA; note = Synthetic coding sequence
atgagtaaacttgccgctgcccatagaggggctatcagagctctccaaatgttcgtcacccagtttaccgaccggggtgagcatcctctgccggctcgatgcaaagagctgggctccctgatacgccaattaagtctatgttccgtgaagcttgatgctgatccatccgtaccagatgttgttatcgacattctgcagcagatcgaagcactcgaatcgctgctggagaaaaagctgagtcccaaaaaagtgaaaaagtgcttttctgagatacgcagccgttttccaatagggtctcaaaaggcgctcgagcgctggccttccaccagccctaaaggagagcggaggcctttaactgctaaggacactttcccacaagagacatcacggcctagcgttgcgaaacagctgcttgcagataagtaccagccggatacagagctgccggagacacagaggctgcagtccgagcttgacgttctcgatgccgacatcgtgctggaggagggcccttttatcctggaccaatcagcctcctttaaggacgaggtcctcgcagttgcaaaaacaaaagcaggcaagaaaaaacctgtgaccgagaacgtgccttttaggaagaaagacacactagctccggctcggcagcaggggctgcggaaagcagaaagaggtcgccagagtcagcctcattccaaatcccgtgtgcaacagactactgtgtctagtcgactgaagatgaatagacagccagtgaaagaccgcaaggccccttggattccacccaatccaacctctccgccagctagtccgaaatgtgctgcctggctgaaagtcaagacctccccgcgagacgctacaaaagagccactgcaacaggaagacccgcaagaagagtcacatttaacaggagcagtggaacacgaggcagcgagactggcgtggttggacgctgagactagtaagcgtctcaaagagctggaggagttaaaggccaaggagattgactctatgcaaaaacaaaggctggattggctcgacgctgagacctccaggaggactaaggagctgaatgaacttaaagctgaggagatgtatcgcctgcaacagttatctgtctccgctacccacttagcggataaagtggaggaggctgttctcgaccgtctgaagcctctccttgtgaaagcccagcgggttaactcaactacggaggctaatatacatctgaaagacggtagttctgtgaacaccgctaaggcacagcccgctcaggaagtggctgccgttgattttgagagcaacaatatccggcagttagacgacttccttgaagattgtgcatccgaactgtgggctgtgacacacgctaagattttaggtagcgagaccctggccaccgtggaggacagtaaggatagcccagatctcgaaatcatgatgcgtagaatggaggagatggaaaaataccaggagtcagtgcggcagcgctataacaaaattgcctatgccgacccacggctttggatgcaagaagagaataacgaccaaaaaatctcagctattagtgagaagccgttatcaccacatcccatccgcatcactaaaactgtggaccgtaaagaccctgcagtaaatatcatgttggaacggccatgtaatgggaattccctagatgaatcagtcgggacagaggaaggatctgagaagcgcgaggccccactcctgagccttgccgaggacagccagcaaaaagagggtcgcgctccccttttcgttccacctggaatgcaacacagcatcggcgattattgttctcgattcgagcaatacctcaggattatatcacatgaagctgttggctccttcaacccatggcttattgcagagtccttctcagaggaactggtggacgaggccctgggcgcagtggcagccgaactgcaagacatgtgcgaggactacgcagaggctgtttttacttctgagttcctggaggctgcgacttag

SEQ ID NO: 31471 - DNA, 3612 bp, synthetic construct
  source 1..3612: mol_type = other DNA; note = Synthetic coding sequence
atgcccgctcggattgggtattacgaaatcgataggacgattggcaagggtaatttcgccgtggttaaacgagccacgcacttggtcaccaaggcaaaggtggctataaaaattatcgataagactcagctggacgaggaaaatctgaagaaaattttccgcgaggtacagattatgaagatgttatgtcatccacacattattcggttgtaccaagtgatggaaaccgagagaatgatttacctcgttacggagtacgcatcaggaggtgagattttcgaccatctggtggctcacgggaggatggcagaaaaggaggcgaggcgcaagttcaaacagatcgttacagccgtgtacttctgccactgtcggaacatcgtccacagagacttgaaagctgagaatctcctgctagatgccaacctaaacatcaagattgctgactttgggtttagtaacttgtttacccctggccagctgctcaagacctggtgcggctcccccccatacgcagctccagagctgtttgaaggcaaagaatatgatggccctaaggtggacatctggagcctaggggttgtactctacgtcctcgtgtgcggcgctctgccttttgatggaagcaccctgcagaatttgagggccagagtgctgtccggcaaattcaggatccccttttttatgtctacagaatgtgagcatctgataagacatatgttggtcctcgaccctaataaacgactcagcatggaacagatttgcaaacataagtggatgaaactcggggacgccgacccaaacttcgatagactgatcgctgagtgtcaacagctgaaagaagagcgacaggtagaccccctaaatgaggacgttctgctggcgatggaagatatgggcctggataaagagcagaccctgcaggctgaacaggcaggcacagctatgaacatttcagtgccacaggtgcagctgatcaatcccgagaatcagattgtggagcccgacggtacgttgaatttggatagtgacgaaggggaggagccttcaccagaggcgttggtgcggtatctgagtatgagacggcataccgtgggtgtggcggacccacgcaccgaagttatggaggatctccaaaagctcctgccaggattccctggcgtgaatcctcaggcacccttcctacaggttgccccaaacgtgaacttcatgcacaatcttctgccgatgcaaaacttacagccaactggacagctggaatacaaggagcagtccctccttcagcccccaaccctgcaactgcttaacggcatgggacctctgggccgacgagcaagcgacggcggagctaacattcagctacatgctcagcagctcctgaagaggccaagagggccttcccccctggtcaccatgacacccgcagtgcctgctgttactccggttgacgaagagagttcagacggcgaacctgaccaagaggctgtccagcgatatctagccaaccgctctaaacggcacacactcgcgatgaccaatcccaccgctgaaatcccccctgacctgcaacgacagttgggccagcagcccttccggtctagagtctggcctcctcacttggtgcctgaccaacatcgtagtacgtacaaggattctaataccctgcaccttcccaccgaacgctttagccccgtgcggcgattcagcgacggcgcagcgtccatccaggcttttaaggctcacctagaaaagatgggcaataatagtagtatcaagcagctccagcaggaatgcgagcagttgcagaagatgtacggaggacaaattgatgagagaactctggagaagacgcaacagcaacacatgttgtaccagcaagaacaacaccaccagatcctccagcagcaaatacaggatagtatctgccccccacagccttctccccctcttcaggctgcttgcgagaatcagccagcactgttgacccatcagctacaacgtttaaggattcagccaagttctccacctcccaaccacccaaataatcatctcttcagacaaccatccaattcacctccaccaatgagctccgctatgatccagccccacggagccgcaagcagctcccagttccaaggcttgccaagccgatctgctattttccagcaacagccggagaactgttccagtcccccaaacgtggcactgacatgtctcggtatgcagcaacctgcacagtcgcagcaggtgacaatccaggtgcaggaaccggtggacatgctgagtaacatgccaggcaccgcagccggatcgtcaggtcggggtattagtattagcccctctgccggtcagatgcaaatgcagcatcgtacaaacctaatggccacactgagctatggacatagaccactgagtaagcaactgagcgcagactctgcagaggcgcatagcgcccatcagcagcccccacactacaccacctcagcacttcaacaagcactactgtctccaacacccccagattataccagacaccaacaggtcccgcacattctccagggcctgctgagccccaggcacagtctcaccgggcattctgacattcggctgccgcctacagagtttgcacagctcatcaaaaggcagcagcagcagaggcagcagcagcaacagcaacagcagcagcaggagtatcaagagttgtttcgtcacatgaatcagggcgatgcagggagccttgccccatccctcggcggacagagtatgaccgaacgccaagccctgagctatcagaacgctgactcgtatcaccatcacaccagccctcagcacttgctccaaatccgggcacaggaatgtgtcagtcaggccagctccccaactcccccacacggctatgcccatcaacctgctctgatgcactctgaatctatggaggaggactgttcttgcgaaggcgcaaaagacgggtttcaggatagtaagtcaagctctaccctgaccaaaggctgccacgactcacccctcttactgagtaccggtggtcctggggatccggagtctctgcttggcacagtgagccacgcccaggagttgggaatccatccctatggtcaccaaccgaccgcagctttctcaaagaataaggtgcccagtcgggaaccagttattggcaactgcatggaccgctcgagtccgggtcaggccgtcgagctccctgaccacaacgggctgggatacccggcaagaccgtctgtccacgaacaccacaggccccgtgctctgcaacggcatcatactatacaaaattctgatgatgcatacgttcagctggacaatctgccaggaatgtcattggttgctggtaaggccctatcttccgcacggatgtcagatgcagtcttgagccaatctagcctcatgggttctcagcagttccaagacggcgagaatgaagaatgtggagccagcttaggaggacacgaacaccccgatttgagcgatggtagtcaacaccttaactcatcctgctacccgtccacatgtatcacagatattttgctgtcttataaacacccagaagtgagcttcagcatggaacaggccggagtttag

SEQ ID NO: 31472 - DNA, 2046 bp, synthetic construct
  source 1..2046: mol_type = other DNA; note = Synthetic coding sequence
atgattgagaagatgcaagggagcagaatggacgaacagagatgttcgttcccgcctccactgaaaaccgaggaagactacataccctatccgtccgtgcatgaggtgctcgggagagaggggccattccccttaatactgctgccacagttcggtgggtattggattgaagggacaaatcacgaaattaccagcattcctgagaccgaacccttgcagagtcccaccactaaagtcaagcttgagtgcaacccgactgctaggatttatcgcaaacacttcctcgggaaggaacactttaattattattccctcgatgctgccctgggacatcttgtgttttctctgaaatatgacgtgatcggtgatcaggaacacctgcggctgttgctacgcaccaaatgtcggacctaccatgatgtgatcccaatcagctgcctcacagagtttccaaatgtggtgcaaatggccaagttggtgtgcgaggacgtcaacgtagacagattttatccagtcctgtatcctaaagccagtcgcctgatagttacctttgacgaacatgttatctccaacaatttcaagtttggggtcatttatcagaagctgggccaaacctcagaggaggaattgttctccaccaacgaggagagtcctgccttcgtggagtttcttgaatttctgggacaaaaggtaaagctgcaagattttaaaggattcagaggaggcctggacgtgacccatggccagacagggactgagtcagtctactgtaactttcggaacaaggaaatcatgtttcacgtgagcacgaagcttccctacacagagggggatgctcaacagctgcaaaggaaaaggcacattggcaacgacattgtagccgtcgtgtttcaggacgagaacactcctttcgtgcctgatatgattgcatctaatttcctccatgcctacgtggtcgtgcaggcagagggcggaggccctgacgggcctctctacaaggtctcagtaaccgccagagatgacgtcccattcttcggaccgcctcttccagaccccgctgtcttcagaaagggacccgagttccaagaatttctcctgacaaaactgattaatgcagaatacgcttgctacaaagcggagaagtttgccaaactcgaggaacggactcgggctgccttgcttgagaccctgtatgaggagctccacatccatagccagagcatgatggggctgggcggtgacgaggacaagatggagaacggcagcggtggcggtggtttctttgaatctttcaagagggtcatccggtcaaggtctcagagcatggacgccatgggtttatctaacaagaagccaaataccgtgagcaccagccatagtggatccttcgcccctaataatccagacttagcaaaggcagccggaatctccctgctgataccgggtaaatcagcttcacgatttggcaggcgtggctctgcaatcgggattggaaccgttgaggaatcactgatcgtgcctgggaagagccctacacggaaaaagtctggtccttttggctctcggagatcctccgctatcgggatcgagaatattcaggaggtgcaggaaaaacgggagagtccgcctgcagggcagaaaacccccgactccggccatgtctctcaggaaccaaagtctgaaaacagctctacacagagcagccccgagatgccgactacaaaaaatagagcagaaactgcagcccagagagccgaggctttgaaagacttttctcggtcgagctcctccgcttcttctttcgcttctgtggtagaggaaacagaaggggtggacggggaggacaccgggttggagtctgtgagttcttccggtaccccccacaaaagggactctttcatatactcaacctggttggaagatagcgtatccaccacatccgggggaagctccccagacgccggtaagctgggcgacccagcttgcccagagatcaagatccagcttgaggcatctgagcagcatatgcctcagctggggtgctag

SEQ ID NO: 31473 - DNA, 675 bp, synthetic construct
  source 1..675: mol_type = other DNA; note = Synthetic coding sequence
atgtccgtgggttacgccaacggaattagggtgatgagcatgacccacacaggcgaaccgggtttcatgttatatattcccatcgaatacgccctgcacgtctacaacgaggttatgtcagttggtcagaagtacggaattcggaacgctgggtactatgctctgcggtccctgaggattgaaaaattcttcgccttttggggccaggatattaataatctcaccacaccgctcgaatgcggtcgcgagagcagggtgaagttagaaaaggggatggattttatcggccgagatgctctcctgcagcagaagcagaacggcgtctataaaagactgactatgtttattctggatgatcacgatagcgatctggatctgtggccctggtggggtgagcctatatatcggaacgggcaatatgttggcaaaaccacttccagcgcgtattcttactcgctggagaggcacgtatgcttgggctttgtccacaatttttctgaggatacaggggaagaacaggtggtgacggccgatttcataaatcgaggcgagtacgagattgatatcgcgggttaccgctttcaagcaaaggctaagctttatcctgtggcttccctgtttacacagaaaagacgcaaagatgatatggagttgtcggacttacatggtaagtag

SEQ ID NO: 31474 - DNA, 1590 bp, synthetic construct
  source 1..1590: mol_type = other DNA; note = Synthetic coding sequence
atgcacttcagcggcctcgaggaagccgtgtaccgcaatatccaggcctgtaaagaactcgcgcagacgacaagaacagcctatggacccaatggaatgaacaagatggttattaaccatctcgagaaactattcgtcacaaatgacgcagctacaattcttcgggaactggaggtacagcatccggctgccaagatgatcgtcatggcctctcatatgcaggagcaagaggtgggcgatgggacaaatttcgtcctcgtgttcgctggagccttgctagagctggctgaggaactcctgcgaatcggtctctcagttagtgaggtgatcgaaggatacgagatcgcgtgccggaaggcacacgaaatattgcctaatctagtgtgctgcagcgccaaaaacctcagggacatcgatgaggtgagtagccttttgagaacatctattatgtccaagcagtacggtaacgaagtcttcctggctaaattgatagcgcaggcctgcgtctctattttccccgactcaggccacttcaatgtggacaacattcgcgtttgcaaaatccttggaagtggcatctctagctcttctgttctacatgggatggtgttcaaaaaggagaccgaaggggatgtgacatcagtcaaggatgccaagatcgcggtatacagttgccccttcgatggcatgatcaccgagacgaagggtacggttttgattaagactgcagaagagctgatgaattttagtaaaggtgaggagaacctgatggacgcccaagttaaggcaatcgccgacactggcgctaatgtggttgttaccgggggaaaggttgctgacatggccctccactacgctaacaagtataacattatgttggtgaggctgaatagcaaatgggatcttcggagactctgcaagaccgtgggggctaccgccctcccacgactgactccgcctgttctggaggaaatgggtcattgtgactccgtctatctgagcgaggtcggagatacacaggtggtagtgttcaagcacgaaaaggaggacggggcaataagcaccattgtgctgcgcggatcaaccgataaccttatggacgacattgaacgcgcagtggatgatggggtcaatacgttcaaagtgcttacaagagataagaggttggtgcccggtggcggagcaactgagatcgagctcgctaagcagattacctcctatggtgagacatgtcctggccttgagcagtacgctatcaagaagttcgctgaggcattcgaggcaattccaagagcactggctgagaattctggggttaaggcgaacgaagtgatatcgaagctttacgcggtccaccaggagggtaacaaaaacgtggggcttgacattgaggcagaagttcctgccgtgaaggatatgctggaagcaggaatcctagatacctacctcggtaagtactgggccatcaaattagccacaaatgccgctgtgaccgtgctccgtgtggaccagatcatcatggcaaaaccggctggtggacccaaaccacccagcggaaagaaggattgggatgacgatcagaacgactag

SEQ ID NO: 31475 - DNA, 2193 bp, synthetic construct
  source 1..2193: mol_type = other DNA; note = Synthetic coding sequence
atgttcggacggaagagatccgtctccttcggaggatttggatggattgacaagacaatgctggcaagccttaaggtcaagaaacaggaactagctaatagcagcgatgcaacccttcccgaccgcccactgtccccacctctgactgctcctcctaccatgaaaagctctgagttctttgaaatgctggagaagatgcagggcataaagctggaggagcagaaacctggccctcagaagaacaaagatgattatataccctacccctccattgatgaggtcgtggagaaaggcggaccgtacccccaggtgattctcccacaatttggcggatattggatcgaagatcccgagaacgtggggactccaacctcactgggcagcagtatttgcgaggaggaggaggaagataatttatcccccaataccttcgggtacaagctcgaatgtaagggtgaggcgagagcctaccggcgacacttcctaggaaaagatcaccttaacttctactgcaccggcagctctcttggaaaccttatcctatctgtcaagtgtgaagaagctgagggtattgaatacctaagggtcatccttaggagtaaactgaaaacagtgcacgagagaattcctttggctggactgagtaaattgccttccgtccctcagattgcaaaggcattttgtgacgatgcagtgggccttaggttcaacccagtcctttatccgaaggcctctcagatgatagtctcgtacgatgaacatgaagtgaataacacttttaagttcggcgtgatttaccaaaaggcccgtcagacccttgaggaggagttatttggtaacaacgaggaatcgcctgcattcaaggaattcctggacctgctaggagatactattactctccaggactttaaggggtttcggggtggcctcgacgtcacacacggacagacaggcgtagagagtgtgtacaccaccttccgcgacagagagattatgttccatgtttccacaaaactgccctttacagatggagacgcacagcaactacagcgcaaaagacacatcggaaatgacatagtcgcaatcatcttccaggaggaaaataccccctttgttccagatatgatcgcctctaactttttgcatgcctacattgtcgtgcaggtcgaaacgcccggtactgagactccgtcctacaaagtgtccgtcactgcaagggaggacgtacccacttttggcccacccctgccaagtcctccggtttttcagaaaggccctgaatttagagagtttctgctcacgaagcttacaaatgccgagaacgcctgttgtaagtctgataaattcgcaaaacttgaagacagaacacgggcagccctgctcgataacctgcacgacgaactccatgcccatacccaagccatgcttggtcttgggccagaggaagataaatttgagaatggtggccacgggggtttcctggaatcctttaagcgtgcaatcagggtgcgtagccactcaatggaaactatggtgggtgggcagaaaaaatcacactctggaggaatcccagggtcactcagcggaggtatctctcataacagcatggaggtgaccaaaaccacattctccccacctgtggtggctgcaacagtcaaaaatcagtcccgttcccctattaagaggcggagcggcctttttccacgtctgcatactggatctgagggacaaggcgactcccgcgctaggtgcgactctacttcaagcacgcctaagacccctgatggcggacacagctcgcaagaaatcaagagcgaaaccagctccaacccaagctcccctgagatttgccctaacaaggagaaaccattcatgaaactaaaggagaacgggcgtgccatctcccggagtagcagctctaccagcagtgtatcctccactgccggagaaggagaggccatggaggaaggggacagtggaggctcacagccttctaccacttctcctttcaagcaggaggtcttcgtttacagtccgtcaccttcatcggagtcgcccagtcttggcgcagcagctactcccatcataatgagtcgtagcccaacggacgcaaagagccgaaactccccccgaagcaatctgaaatttaggttcgataaacttagccacgctagtagtggagcaggccactag

SEQ ID NO: 31476 - DNA, 2271 bp, synthetic construct
  source 1..2271: mol_type = other DNA; note = Synthetic coding sequence
atggttgcccctgtcctcgagacctcacatgtgttctgctgccctaacagagtgcgaggtgtcttgaattggtctagcggacctcgcggtttgctcgccttcggtacctcctgttctgtagtgctgtacgaccccctgaaaagagtcgttgtgaccaacttgaacgggcacaccgcaagggtcaattgtatccagtggatttgcaaacaggacgggtcgcctagtacagagctggtgtcagggggttccgacaaccaggtgatccattgggagattgaggacaatcagcttctcaaggcggtgcacctgcagggacatgagggtcctgtctatgccgtccacgcagtatatcagcgacgaacttccgaccccgcattgtgcactcttattgtatccgcagccgcagacagtgccgtgagactctggtccaagaaaggaccagaagtgccaatcctcgcttgtggtaacgatgactgtcgcatccacatcttcgctcagcaaaacgatcaatttcagaaagtgctcagcctctgcggccacgaagactggatccggggagtcgaatgggctgcgttcgggagagatttatttctcgcgtcctgcagccaggattgcctgataaggatatggaaactgtacataaaaagcacctcactggagacacaagacgacgataatatccggctcaaagaaaacactttcacgatcgagaacgagagtgtcaagatagccttcgccgtcaccctggaaacagttctagccggtcacgagaactgggtgaatgccgtccactggcagcccgttttctataaagatggagtcctgcaacagcctgtgcgcctgctgagtgcctctatggacaagacaatgatcctgtgggctcccgacgaagaatctggcgtgtggcttgagcagcgcgagtggactccggaaattgtgattagcggccacttcgacggggtccaggatttagtatgggaccccgagggcgaatttatcataaccgtcggcacggatcaaactacccgcctttttgccccatggaagcgcaaggatcagagccaggtgacatggcatgaaatcgcgagaccacaaattcatggttacgatcttaaatgtctcgctatgatcaatagatttcagtttgtcagcggggctgatgaaaaggtccttagggtattcagtgccccaaggaacttcgtggaaaatttttgcgccattacagggcaatccttgaaccacgttctctgtaaccaggattctgacctgcctgaaggggctacagtaccagcgttaggactgagtaataaagcggtctttcagggtgacattgcttcccaacccagcgatgaagaagaattactcactagcacgggcttcgagtatcaacaggtcgcattccagcctagcattcttacggagcccccaacagaggaccatttgctgcagaacacattatggcctgaagtgcagaaactgtacggacatggatacgaaattttctgtgtgacatgtaacagctcaaagacactcctagctagtgcgtgtaaagccgctaagaaagaacatgccgctatcattctgtggaatacaactagctggaaacaagttcagaacctggtttttcactctctcacagtgactcagatggctttctctcccaatgagaagttcctgctcgctgtgagcagggacaggacttggagcttatggaagaaacaggatacaatttcccccgagttcgagcctgtcttcagcctgtttgcatttacaaataaaatcacttccgtgcacagccggatcatctggagttgcgattggagcccggactcaaaatatttctttactggaagccgggataagaaagtagttgtatggggcgaatgcgactcgacggacgattgcatagagcataacattggtccttgttcaagcgtcttagacgtgggcggagccgttactgccgtgtcagtatgtcccgtgttacatccatctcaacggtacgttgtcgcagttggcctcgaatgtggtaaaatttgcctttacacctggaaaaagaccgatcaagtgcctgagatcaacgattggacgcactgcgtggagactagtcaaagtcagtctcatactctcgcgatccgcaagttgtgttggaaaaactgcagcgggaagacagaacaaaaagaagccgagggcgcagaatggctgcacttcgcctcgtgcggagaagatcataccgtgaagatccaccgcgtcaacaagtgtgcattgtag

SEQ ID NO: 31477 - DNA, 1272 bp, synthetic construct
  source 1..1272: mol_type = other DNA; note = Synthetic coding sequence
atgaacaggcagccggtgaaggaccgcaaagccccatggattccaccaaatcccacaagccccccagccagcccaaaatgtgccgcttggctgaaagtcaaaacatctcctcgggacgcaacaaaggaacccctgcagcaagaggacccacaggaagaaagtcacctcactggggcagtggagcacgaagccgctaggctggcctggctggacgcggagactagcaagaggctcaaggaactcgaagagctgaaggccaaagaaatcgattccatgcagaaacaaagattagactggctggacgccgagactagtagacgtacgaaggaactcaatgaattgaaggcagaggagatgtaccggctgcaacagctcagcgtgtccgcaacccacctagccgataaagtggaggaagccgtcctcgatcgtctcaagcccctgttggttaaggcccagagagttaacagcaccacggaggccaatatccacctgaaggacgggagctcagtcaacacggctaaggcccagcccgctcaggaagtcgccgctgtagacttcgagtcaaacaatatccggcagctggatgactttttggaggattgcgccagcgaactgtgggcggtgactcacgccaagatcttaggatccgagactttggctaccgtggaggatagtaaagattcccccgatctggagataatgatgcgacgcatggaagaaatggagaaataccaggaaagtgtgcggcaacggtataacaaaattgcatacgccgatcccagactgtggatgcaggaggagaacaatgaccagaagatctccgccatctcggaaaaaccactctcccctcatcccattcgcataaccaagaccgttgacaggaaggaccccgctgttaatatcatgcttgagagaccatgtaatggcaattcgctggacgagtctgtggggacagaagaaggttcagaaaagcgcgaggcacctctcctcagcttggcggaagacagtcagcagaaggaaggccgtgcaccattgttcgtcccgccaggcatgcagcactcaattggagactattgttccaggttcgagcagtacttgcgcatcatctcgcatgaagccgtggggagtttcaatccctggctaatcgccgaaagtttttccgaggaactggtagatgaagcgctgggggctgtggcagcagagctccaggatatgtgtgaagactatgcggaagctgtattcaccagcgagttcctggaagctgctacatag

SEQ ID NO: 31478 - DNA, 777 bp, synthetic construct
  source 1..777: mol_type = other DNA; note = Synthetic coding sequence
atggctcgcctgcaggaggagcatggcgaccagctactttccattcgctgtcaacatcaagagcaagttgaagatttgactgcttcccatgatgccgcactgctcgaaatggagaacaaccacaccgtggccataaccatactgcaggatgaccacgaccataaggtacaggaactgatgagtacacacgagctggaaaagaaggagctggaggagaatttcgagaaattgcgactgagcctacaggatcaggttgatactcttacctttcaaagtcaaagccttcgggacagggcacgccgatttgaagaggcactgaggaagaacacagaggaacagctagaaattgcactggccccttaccagcaccttgaggaggacatgaaatcgttgaagcaagtgcttgaaatgaagaatcagcagatccacgaacaggaaaagaagatcctggagttagaaaagctggctgagaaaaatatcatattggaagagaaaattcaggtgttgcaacagcagaatgaagacttaaaggcaaggatcgaccagaacacagtggttacgcggcagctttcagaagaaaatgccaacctgcaggagtacgtggagaaggaaactcaggagaaaaaaaggctcagtcgaacaaatgaagagcttttgtggaagttacagaccggcgatcccacctctcctatcaaacttagtcctactagtccagtgtatcgagggagtagctctgggcctagttcccctgctagggtcagcaccaccccacggtag

SEQ ID NO: 31479 - DNA, 1053 bp, synthetic construct
  source 1..1053: mol_type = other DNA; note = Synthetic coding sequence
atgtgcccaaccacgacttggcctagagggcgtcgttggagccggaacctgcgtgacacccaggccgttcgtcattacaaaatttggagacgagctggagggaggctccatctgaacgaggcagtctcattcctttccctgccagaactcgtgaattatcaccgcgctcagtccttaagccatgggctgagacttgcagcaccctgccgtaagcacgaacctgagcccctgccacattgggacgactgggagcgaccccgagaggagttcacactctgccgaaaactgggatcaggctacttcggggaagtgtttgagggtctgtggaaagatagggttcaggtggctataaaggttattagcagagacaacttgttgcatcagcagatgctccagtccgaaatccaggcaatgaagaagctgcggcacaagcatattcttgcactgtacgccgtggtctctgtcggcgacccagtatacattatcacagaactgatggccaaaggatcactgcttgagcttcttcgcgattccgacgaaaaggtactgcctgtgtccgaattattggatattgcgtggcaagtggccgagggaatgtgttacctggaaagccagaactacatccatcgggacttggctgccagaaatattctcgtcggagagaacaccctgtgtaaagtgggggattttggtctggctagattgataaaagaagatgtgtacctgagccacgatcacaatatcccatacaagtggacagcacccgaggccctctcaagggggcactactccaccaaatcagacgtgtggtcattcggtattctgcttcacgagatgttcagccgcggacaggtcccctatccagggatgagtaaccacgaggcctttctacgagtggatgccggttatagaatgccctgccccctcgagtgtcctcctagtgtgcacaaactgatgcttacctgctggtgtagggatcctgaacaacggccatgcttcaaagctctgcgcgagcgccttagcagcttcactagctatgagaaccctacgtag

SEQ ID NO: 31480 - DNA, 3480 bp, synthetic construct
  source 1..3480: mol_type = other DNA; note = Synthetic coding sequence
atggtgtcctcttctcctagtaccccgtctaatatcccccagaaaccttcacagccagcagcgaaggagccgtctgccacaccgcctattagcaatttaaccaaaacggctagtgagtctatatccaacctgagcgaagcagggtcaattaagaagggcgagcgtgaactgaagataggcgatcgggtgctggtagggggtaccaaggcgggagtagtgagattcctaggagagaccgattttgcaaaaggcgaatggtgcggtgtcgagttggatgaacctcttggcaagaatgatggcgctgttgccggtacacggtattttcagtgtcagcctaagtatggtctcttcgcccctgtacataaggtgacaaaaattggctttccatcaaccacgccggcaaaggccaaggccaacgcggtgcggcgagtaatggccactacgtcagcgagcctgaagaggtctccgagcgcttcatcgctgtcatcaatgagttcagtggcttccagtgtgagttccagaccaagtagaaccgggctactgacagagacatccagcaggtacgccaggaaaatcagtggtacaaccgctcttcaggaagctctgaaggagaagcaacagcacatcgagcagctcctggctgagcgtgacttggaacgcgctgaagtcgccaaggcaactagtcacgttggcgaaattgaacaggaactcgcattagctcgagacggacacgatcagcacgttctcgagctcgaggccaagatggaccagctccgaactatggttgaggcagcggacagagagaaggtggaattattgaaccagctcgaggaggaaaagcgtaaagtggaggaccttcagtttagggttgaagaggagtcaatcacaaagggagatctggagacacagacaaaactggagcatgctcggattaaggagctggaacaaagcttattgtttgaaaagacaaaggcagataaactacagcgagaactggaggatacacgggttgccacagtcagtgaaaaatctagaataatggaactagagaaagatctggccctgagagtgcaggaggtggccgagctgcgccgacggctggaatcaaacaagcccgctggcgacgttgacatgtctctctcactactgcaagaaatcagtagtctgcaggagaaactggaggtgaccaggaccgatcatcagcgggaaataaccagtcttaaagagcactttggcgcaagggaggaaactcaccagaaagaaattaaagctctgtatactgccacagaaaagctgagcaaagagaatgagagcctgaagagcaagttggagcatgcaaataaggagaattccgatgtcattgctctttggaaatccaagctggagaccgcaattgccagccaccagcaggccatggaggagctgaaggtgagcttctcaaagggcctaggaactgagactgctgagttcgccgagctgaaaactcagatcgaaaagatgcgtcttgattaccagcatgagatcgagaacctccagaatcaacaggacagcgagagagctgcacacgcaaaggaaatggaggcgctacgggctaagctgatgaaagtaataaaggaaaaggagaattctctggaggctattcgctcaaaactcgacaaggccgaggatcagcacctagtggaaatggaagacacgttaaacaaactccaggaggccgagattaagaaagaaaagttcgcagaagcttccgaagaagctgtatcagttcaacgctccatgcaggaaacggtgaacaagctccatcagaaggaggaacagtttaacatgctatcatccgatctggaaaaattaagagagaaccttgccgatatggaagccaaattccgggagaaagatgagagggaggaacagttaattaaagccaaggagaagttagaaaacgacatagccgaaatcatgaaaatgtccggagacaatagctcgcagctaactaagatgaacgatgagctgcgcttgaaggagcgcgacgtcgaagaactgcagctgaaactgacaaaggctaacgaaaacgcgtccttcctgcaaaaatcaatcgaagatatgactgtcaaagctgaacaaagtcagcaagaggcggctaaaaaacacgaagaggagaagaaggagctggagaggaagctgagtgaccttgaaaaaaaaatggaaactagccacaaccaatgtcaggaactgaaggcaagatatgagagggccaccagcgagactaaaacgaaacacgaggaaatcctgcagaaccttcagaagactttactagatacagaggataagctgaaaggagctcgcgaggaaaattctgggctgctgcaggaacttgaggagctgcgcaaacaggccgataaagctaaggcagctcagacggctgaagacgcaatgcagataatggaacagatgactaaggagaaaaccgagactttggccagcctggaggacactaagcagacgaacgctaagctgcagaatgagctggacactctgaaagaaaacaacttaaagaacgtagaagaattgaataaatctaaggagctcctgacagtggaaaatcagaagatggaagaatttcgcaaagaaattgagacactgaaacaagccgctgcacagaaatcccagcaactttctgctctgcaggaggaaaacgtgaagctggcggaggagttggggcgaagtagggacgaggttacctcccaccagaagttggaggaggagcgctcagtcttgaacaaccagctgctggagatgaaaaaaagggagtccaaatttattaaggacgctgatgaagaaaaggcttctctgcagaagtcaatctccatcacctcagccctgttgacggagaaagatgctgaacttgagaagctacgaaacgaggtgaccgtacttaggggcgaaaatgcttctgccaagtcgctccactccgtcgtgcagaccctagagtctgacaaagtcaaacttgagctgaaggtgaagaatctcgaacttcagctaaaggaaaacaagaggcagctgagctctagttctgggaatacagacacccaggccgatgaggatgaaagagcccaggaatcccagaatcagatcgactttttaaattctgtgatcgttgacctgcaacggaaaaaccaggatctaaagatgaaagttgagatgatgagcgaagccgctttaaatggtaacggtgatgatctaaacaactatgattctgacgaccaagaaaaacagagtaagaagaaaccaagactgttctgcgacatctgtgactgcttcgatttgcatgacacagaagactgtcctacacaggctcagatgagcgaggacccaccccactctacccaccatgggagtcggggtgaggagcgcccatactgtgaaatttgcgaaatgttcgggcattgggccactaattgcaacgacgacgaaacattctag

SEQ ID NO: 31481 - DNA, 756 bp, synthetic construct
  source 1..756: mol_type = other DNA; note = Synthetic coding sequence
atgaccaccgagcagcgacgcagtctgcaggcctttcaagactacattcgaaaaaccctggacccaacctacatcctgagctatatggctccctggtttagagaggaggaggtgcagtatatccaggcagagaaaaataataaaggccctatggaggcagccacgctttttctgaagtttttactagagctgcaggaggaagggtggtttaggggcttcctggatgccctggatcacgctggatatagcgggttgtatgaagccatcgaaagttgggactttaagaaaatcgagaagctggaagagtaccgcctgctcctcaagagactgcagccagagttcaagacacggataatccccacagatatcataagtgatctgagtgaatgcctgatcaatcaagagtgtgaagagatcctgcagatctgctctaccaaaggtatgatggcaggggcagagaagctggtcgagtgtcttctacgaagtgataaggaaaattggcccaagacactaaaactggcattggaaaaggaaagaaataagtttagcgaactgtggatcgtggaaaaaggaatcaaagatgtggagacggaagacttggaagataagatggagactagcgatatccaaatattttatcaagaagatcccgaatgtcagaacttaagcgaaaacagctgtccaccttctgaggtcagtgacaccaacctgtattcccctttcaagccaattaagaaaaagaaaaaaaagaagtag

SEQ ID NO: 31482 - DNA, 3189 bp, synthetic construct
  source 1..3189: mol_type = other DNA; note = Synthetic coding sequence
atggtaagcagtgcgcagatggggttcaacttgcaggccttgctcgagcagttgagccaggatgagttatctaaattcaaatacttgatcaccaccttcagtcttgcccacgaacttcagaagatcccacataaagaggtcgataaagccgacggaaagcagctggtggagatcttgacgacccattgcgacagttactgggttgaaatggcctctttacaggtgttcgagaaaatgcatcggatggatctatccgagagggccaaagatgaggtccgggaagccgctctgaaatcatttaataagcgcaaacctttaagtttgggcataacccgcaaggaaaggccacctctcgacgtggacgaaatgctggagagattcaagactgaagcccaggcctttacggagaccaaaggcaacgtcatctgtttagggaaggaagtttttaaagggaagaagcctgacaaagataaccggtgcagatacatcctcaagactaagttcagagagatgtggaagtcatggcctggagactcaaaagaggtccaggtaatggccgaacgctacaagatgcttataccctttagtaacccaagggtattgcccggtccattttcctatacagtggtcctgtacggtcccgctggactaggaaagaccactctcgctcaaaaattgatgctggattgggccgaagataaccttattcacaagttcaaatatgctttctacctgtcatgcagagagctatcgcgcctaggaccatgtagcttcgccgaacttgtgtttcgggactggcctgaactgcaggatgatataccacacatcctggctcaggccagaaagatccttttcgtgatcgacggattcgatgagctgggcgcagcacctggcgctctcattgaggacatctgtggggattgggaaaagaagaagcccgtaccggtgctcctggggtcccttttgaaccgcgtgatgctgcccaaagcggctctgctggtgacaacccgcccacgggcactcagggatctgcgtatcctggcagaagagccaatctatattagagtcgaaggtttccttgaggaggacaggcgtgcttattttctcagacactttggcgatgaggatcaggcgatgcgcgctttcgaacttatgcgttcaaatgcggctctttttcagctgggctccgctccggctgtatgttggatagtgtgcacaactttaaagctgcagatggagaagggtgaggatcctgttccaacgtgcctgactagaaccggcttgtttctccgatttctttgttctaggttcccgcagggcgctcagctccgcggagcacttcgtacactgagcctgctggcagcgcaaggcctgtgggcccagaccagcgtcctgcatcgggaggacttggagcggctgggcgttcaagagtcagacctccggctgttcctcgacggtgatatcctgagacaggacagagtgtccaagggctgttactcttttattcacctgagtttccaacagtttttaacggccctattctacacactggaaaaagaagaagaggaagacagagatggccacacttgggatattggcgatgtccagaaactgctgtctggcgtcgagagactgagaaaccctgacctaattcaagcagggtattattctttcggtctggccaacgaaaagcgcgcaaaggaactggaagctaccttcgggtgcaggatgtctcccgatatcaagcaagagctgctcagatgtgacataagttgtaaaggcggacattcaactgtgacagatcttcaggagttacttgggtgcctctatgaatcccaggaagaagaactggtgaaggaggtaatggcccagtttaaggaaatttccctacatctgaatgcagtagacgttgtgcccagctcattctgtgtgaagcactgccgaaacctacagaaaatgtctctccaagtgattaaggagaatcttcccgagaatgtgaccgcaagcgaaagcgacgctgaggtggagcggtcccaagatgaccagcacatgttgcccttttggaccgacttgtgttctatctttggatcaaataaagatctcatgggtctcgccatcaatgacagcttcctgagtgcctctctcgtccgcatcctgtgtgaacaaattgcttccgacacgtgccatctgcagagggtcgtatttaagaatatcagccccgctgacgcacacaggaacctctgtctggccctcaggggccacaaaactgttacttacttaaccctgcagggaaatgatcaagatgacatgtttccggcactgtgcgaagtccttcggcaccctgagtgtaatcttagatatctgggcctggtgtcttgtagtgcgacgacccagcaatgggccgatttaagcctggcattagaggtgaaccagagcctcacttgtgtgaatctgtctgataacgaactactcgacgaaggcgctaaactgctttacactacccttaggcaccccaaatgcttcctgcagcgactgtccctggagaattgccacctgacagaagctaactgtaaggatctggccgcagttctcgtagtgtcacgtgaactgactcatctgtgcctggcaaagaatccaataggaaacaccggggtgaagtttttgtgtgaaggccttagatatccagagtgtaagctgcagacattagtcttatggaactgtgatataacctctgatggttgctgtgaccttaccaaactgctgcaggagaagtcttccttgttgtgtctggatctgggactgaaccacatcggagtgaagggtatgaagtttctttgcgaggctcttaggaaaccactgtgcaacctgagatgcctctggctttggggatgttcaattccccctttctcctgtgaagatctctgttctgccttaagttgcaatcagtcgctggtaacactcgatctcggacagaatccactgggcagttcgggggtcaagatgctgttcgaaacgctgacgtgtagtagtggcactctgagaacattgaggctgaagattgatgattttaatgatgagctgaacaaattgctcgaggagatcgaagagaagaacccacagcttataatcgacaccgaaaaacaccatccttgggccgaacgccctagttcccatgacttcatgatctag

SEQ ID NO: 31483 - DNA, 363 bp, synthetic construct
  source 1..363: mol_type = other DNA; note = Synthetic coding sequence
atgtggagtattgagaatattgcctttggcagcggaggaggcctgctgcagaagctcacaagagacctgctcaattgctcttttaaatgtagctacgtcgtcacaaatggactcgggatcaatgtttttaaggacccagtagctgatcccaacaaaaggtctaaaaaagggaggctctctttgcaccgcactcccgctggtaattttgttacgctggaggagggcaagggcgacctcgaggagtacggacaggatctgcttcatactgtcttcaagaacggaaaagtgacgaaatcgtatagttttgacgagatacggaagaatgcccagttaaacatcgagttagaggccgcacaccactag

SEQ ID NO: 31484 - DNA, 936 bp, synthetic construct
  source 1..936: mol_type = other DNA; note = Synthetic coding sequence
atgtaccacttggacaaccacccagagaagcaattctcgactgacgtactaaaacaagctattgagctctcgcccgataatcagtatgtgaaggttttgttgggtctgaaactccagaagatgaacaaggaggcggaaggcgagcagtttgtcgaagaggccctcgaaaaatccccctgtcagaccgacgtcctgaggtccgcagcgaagttctatcgcaggaagggggacttggataaagcgatagaattgttccaacgagtgcttgaaagtactccgaacaatgggtacctgtaccaccagataggctgttgctacaaggcaaaagtcaggcaaatgcaaaatacaggggagagtgaagctagtggaaataaagaaatgatcgaggcccttaagcagtacgctatggattatagtaacaaagcccttgagaaaggtttaaatccgctgaatgcatattccgacctagccgaatttttagagaccgagtgttatcagactcctttcaataaagaggtgcctgatgccgaaaaacaacagtcccaccagagatactgcaatctgcagaaatacaacgggaaatctgaagatacggcagttcagcatggcttagagggcctaagtatctcgaagaaatcaaccgacaaggaggagatcaaggaccagcctcagaacgttagcgagaacctgctgccgcaaaacgctcctaattattggtacttgcagggactcattcataaacagaacggggatcttctgcaggccgcaaagtgctacgagaaggagctgggacgattgctgcgcgatgcaccttcaggtatcgggagcatctttctgagcgcaagtgaacttgaagacggaagtgaagagatgggacagggcgctgtgtcctctagtccaagggagttactctctaacagtgagcagctcaactag

SEQ ID NO: 31485 - DNA, 3267 bp, synthetic construct
  source 1..3267: mol_type = other DNA; note = Synthetic coding sequence
atgtacggttcagctagatccgtgggaaaagtcgagccatcaagccaaagccccggtagaagccctagactgcccagatccccgagactcggacaccgcagaaccaacagcaccggcggttcatcagggtcctccgttggcggagggtctgggaagacgctgagcatggaaaacattcagtcccttaatgccgcttacgctacctcagggcctatgtacctctcagatcacgagaacgtgggcagcgagactcccaaaagtaccatgacattgggacggtccggaggacgtcttccttacggcgtgaggatgacggccatgggctcctctccaaatattgcatcaagcggagttgctagtgatacaatagcatttggggaacaccatttgcctcctgtgagcatggccagtacagtgccccatagcctgcgccaagctcgcgataacacaatcatggacctgcaaactcagctgaaggaggtcctacgggagaatgacctgctgcggaaagacgtggaggtgaaagagtccaagttatcttcctctatgaattctattaaaacattctggagccccgaattgaaaaaagagagagcactgcgcaaggatgaggctagcaagatcaccatttggaaggagcagtaccgggtcgtgcaggaggaaaatcaacacatgcagatgaccatccaggccctccaggacgagcttaggatccagcgggacctaaaccaacttttccaacaggactcttccagccgcactggcgagccttgcgtggctgagctgaccgaagaaaattttcagcgcttacacgctgagcacgagcgccaggccaaagaactttttctcctgcggaagacccttgaagagatggaactacgtattgagactcagaagcaaacgctgaatgcacgtgatgagagcatcaagaagcttctggagatgctgcagtccaaaggcttgagcgctaaagccaccgaagaggaccatgagcgcacacggaggttggcagaagctgagatgcatgtgcaccacctggaatcccttttagaacaaaaggagaaggagaactcaatgctgcgtgaagagatgcaccgtcgcttcgagaacgctcctgactcagcaaagaccaaagctctgcagaccgttatcgaaatgaaagattcaaagatctcctccatggagcgcggtcttcgggaccttgaggaggagattcaaatgctcaagagcaacggggctctgagcaccgaggagagggaagaagagatgaagcaaatggaggtgtatcggtctcactcaaaattcatgaagaataagatagggcaggttaagcaagagctgtcccgcaaagatacagagcttctcgcactgcaaacaaagttggagacattaacaaatcagtttagtgactcgaagcagcatatagaagtgttgaaggagtctttgacagcaaaggagcaacgggctgctatcttgcagaccgaggtggacgccctgcgactcagactggaagaaaaggaaaccatgctaaacaagaagactaaacagatccaagacatggccgaagagaaaggcacccaggccggagagatacacgatttgaaggacatgctggatgtgaaggaacgcaaggtcaatgtgctgcagaaaaagattgagaatctgcaggagcagctgcgcgataaggagaagcaaatgagctcactgaaagagcgagtcaagtcccttcaggcggacaccaccaatactgacaccgcgctaacaacattggaagaggcgctggccgagaaggagagaaccatcgagaggctgaaagagcagcgggatcgtgatgagcgcgaaaagcaggaggagatcgacaactacaagaaggatctgaaggacctcaaggagaaagttagcctgttgcagggcgacctctccgagaaggaggcctcgctgctcgatctgaaggagcatgcatcctcgttggcaagctctggcttgaaaaaggattcaagactcaagactctggaaatcgccctggagcaaaagaaggaagaatgtttaaagatggagagccagctcaagaaagcacacgaggctgctctggaagctagagcttcccccgaaatgagcgaccggatccagcacctcgaacgcgagatcacacgatataaggacgaaagctcaaaggcccaagccgaagtggatcgcctgctcgaaatcttgaaggaagtcgagaatgagaagaacgataaggacaagaaaatcgctgagttggagcggcaagttaaggaccagaacaagaaggtggcaaacctgaagcataaggagcaggtcgagaagaagaagagcgcgcagatgctggaagaagcgaggagaagagaagacaacctgaatgactcctcccagcagctccaagacagcttacggaaaaaggatgaccgcattgaggaactggaggaggcacttagggagtcagtccagatcacagctgagcgagagatggtcttagctcaggaggagagcgccagaacaaacgccgaaaaacaggtcgaggagctgttaatggccatggaaaaggtcaagcaggaattagagagtatgaaggccaagttgtcctcaacacagcagagtctggcagaaaaagagacccacctgacaaacctccgggctgagcgacggaaacacttggaggaagtcctcgagatgaaacaggaggcgcttctggccgctattagcgaaaaagatgcaaacattgctctgctggaactctcttcctccaagaaaaaaacccaggaggaggttgccgctcttaagcgagaaaaggacagactggttcagcagttaaagcagcaaactcagaataggatgaagctcatggcagataattacgaagacgaccacttcaagtccagccattccaatcaaacaaaccacaagccaagccctgaccagatcattcaaccattgttagagctcgatcagaacaggtcaaagctgaagctgtacattgggcatctgacaactctatgtcatgatagagatcctctgatcctacgcggactaacccctcctgcctcatataacttggacgatgaccaggcagcctgggaaaatgaattgcagaaaatgactcgaggccagctgcaggatgagctggagaagggcgagagggacaatgctgaactgcaggagttcgcaaatgccatcctgcaacagattgctgaccactgtcctgatatattagagcaggtagtgaacgcactggaggaaagctcatag

SEQ ID NO: 31486 - DNA, 1485 bp, synthetic construct
  source 1..1485: mol_type = other DNA; note = Synthetic coding sequence
atgaaattagttaacctctataagggtgccgtgctgtacctgcttagaggtcggaagaccttcctgataccagtgcttttcaataattatataactgctgcacttaaacttctcgaaaagttgtacaaggtcaatttgaaagtcaaacatgtcgagtacgataccttttacatcccagagatttccaacttggttgacattcaggaggattatttaatgtggtttttgcaccaggccggaatgaaggccagaccctctatcatacaggacacagtgacattatgttcctatccttttatatttgacgcccaggctaagactaaaatgttgcagacagatgctgaattacagatgcaggtggccgtcaacggcgctaatctgcagaacgtgttcatgctactgaccctggaacctttgctggcgaggagccctttcctggtgctacatgtgcgtagaaataatctcgtgggcgatgcactccgcgagcttagcatccactctgacatcgacttaaaaaaaccgcttaaagtcattttcgatggcgaggaggccgtggatgctggcggtgtgaccaaggagttcttcttgctgcttctgaaagagcttttgaaccccatctacggaatgtttacttattaccaagattcaaatttactgtggttttccgacacatgcttcgtagagcacaactggtttcacctgattggcataacttgtggattggcaatttataacagcacagttgttgacctccattttcctctggcgctgtacaagaagcttctaaatgtaaaaccaggtttggaagacctgaaagagctttcgcccaccgaaggtcgtagtctccaggaactcctggattaccccggtgaagacgtcgaggaaacattctgtctgaactttactatttgccgcgagtcttacggggtcattgaacaaaaaaaactcatccctggaggtgacaatgtgacagtgtgcaaagacaatcggcaagagtttgtggatgcatacgtgaactatgtttttcagatctcggtacacgaatggtatacagctttttcatcagggttcctcaaggtgtgtgggggaaaggtgctagagctgttccagccatctgagctgagggccatgatggtcgggaattcaaactataactgggaggagttggaggaaacagccatatacaagggggactattccgccacccatccaaccgttaagttgttttgggaaacattccacgagtttccattggaaaaaaagaagaagttcttattatttctcactggaagcgatagaatacctatttatggaatggctagcctgcagatcgtaatccagagcacagcatcaggagaagagtacctgccagtcgcccatacttgttataaccttcttgatctgccaaagtacagctccaaagaaatcctgtctgctcgactcacacaggctctcgataattatgaaggcttcagcttggcttag

SEQ ID NO: 31487 - DNA, 2370 bp, synthetic construct
  source 1..2370: mol_type = other DNA; note = Synthetic coding sequence
atgtgtcctagtagtcagtcccccaggcctccactgctgcgtcctccgtgcagttaccgagaggtcccttcatctgtacagtcccccgcacagcagcaggtgccggctcggcctggagctcctagcgtgcaagttccctcaccatttcttctccagaaccagtatgagccagtgcaacctcactggttttactgcaaagaggtggagtacaagcaactgtggatgcccttctcagtctttgatagcctcaacctggaggaaatttataactccgttcaaccggatcccgagagtgtggtcctggggaccgatggaggtaggtatgacgtgtacctgtacgacagaatacggaaagccgcatactgggaggaggagcccgcagaggtgcgcagatgcacttggttttacaagggggacacagactctcgcttcatcccctacacggaagagttctcagagaagttggaagcggagtataagaaggccgttaccacaaatcaatggcaccgccgactggaattccctagtggggaaacaatcgtcatgcacaatcccaaggtgatagtccaatttcagcctagttcggtacccgatgaatggggcacaacccaggatggccagacaagacccagagtggtcaaacggggtatagacgataacctcgatgagatcccagacggggagatgccgcaggtcgatcatctagttttcgtggtgcacgggatcggtcccgtttgtgacctgcgattccgctctattattgaatgcgtggatgattttcgcgtagtatccctcaagttgctgagaacccacttcaaaaaatctttggacgatggcaaagtgagcagggtggagttcctgcctgttcattggcattcttctctggggggagacgcgaccggggtagacaggaatataaaaaaaattactctgccgtccatcgggcgattccgccacttcacgaatgagacactattagacatactattttacaactcccctacatactgccaaacaattgtggaaaaggtgggtatggagatcaatcatctgcacgctctgttcatgagtagaaaccctgacttcaaggggggagtatccgtggctggccactctctggggagcctcatactgtttgatattctttctaaccagaaagacctaaacctaagcaagtgcccagggcctttagcagtggctaacggagttgtgaaacagttgcatttccaagagaagcagatgcctgaggagccaaaactgacacttgatgaatcttatgacctagttgtcgaaaacaaagaggtgctgactctacaggaaacactcgaagcattgtccctgtcggaatatttttcaacctttgaaaaggagaagatcgatatggagtccctgctgatgtgtacagtggatgacctgaaagagatgggcatacctctaggaccgagaaagaaaattgctaatttcgtcgaacacaaagcagccaaattaaaaaaagccgcatctgagaagaaagccgtcgcagctacgtccaccaaggggcaggagcaatcagcccagaaaacaaaggacatggcctcgctgccatctgaaagcaacgaacccaaaagaaagctacccgtgggagcatgcgtgtcgtccgtgtgtgtgaactacgagagctttgaggtgggcgctggccaggtttctgttgcatacaacagtcttgactttgaacctgagatcttcttcgcgctgggctcacccattgcaatgttcctcaccatacgcggtgtagaccgaatagatgaaaattattccctgccaacttgcaaaggcttctttaacatttatcatcctttggatcctgtggcttataggctggagccgatgatcgtcccggatctggatctgaaagcagtgctgatcccacaccacaaaggcagaaaaagacttcacctggagttgaaggaatccctgtctcgcatgggatctgatctgaaacaaggcttcatctcttcactgaaaagcgcgtggcagacactgaatgaatttgctagagctcataccagcagcacccagctccaggaggaattggaaaaggtcgccaatcagatcaaggaggaagaggagaaacaggttgtggaagccgagaaggtcgtggagtcccctgatttctcaaaggatgaggactacctggggaaagtcggcatgctgaatggtggccgtcgtattgattatgtactgcaggaaaaaccaattgagagctttaacgagtacttatttgcccttcagagccacctgtgttactgggaaagtgaagacactgcacttcttttgctgaaggaaatttatcgtactatgaacatcagccccgaacagccccagcactag

SEQ ID NO: 31488 - DNA, 828 bp, synthetic construct
  source 1..828: mol_type = other DNA; note = Synthetic coding sequence
atgtccgcagaggtcaaagtgaccggacaaaatcaagagcagttcctgctgctcgcgaagtcagccaagggggctgctcttgccactttgatacaccaggttctggaagcccctggagtgtacgtctttggggagctgctcgatatgccaaacgtaagggagctggccgaaagtgactttgcaagcacctttaggttgctgacagtgtttgcctacggcacttatgctgactacctcgccgaagcaaggaacttgccaccattgacagaggcacagaagaacaagctacgccatttgtccgtggtcacactggccgcaaaagttaaatgtattccatacgccgtgttgctcgaagctcttgcactccgcaatgtgcggcaactcgaggacctcgtaatcgaagctgtgtacgccgatgtgctccggggtagtctggatcaacgtaatcaaagattagaggttgactacagcattggcagagatatccaacggcaggaccttagcgccattgccaggactctgcaggagtggtgtgtggggtgcgaagttgtgctgagcgggattgaggaacaagtttcccgggctaatcaacacaaagaacagcagctagggttgaaacagcagattgagagcgaagtggcaaacctgaagaaaacaatcaaggtgaccaccgccgctgcggctgctgcgacatcccaggaccccgaacaacatctaaccgagttaagggagcccgctccaggcactaaccagagacagccctcaaaaaaagcctctaaagggaagggactgcgaggctctgccaagatctggagcaagtccaattag

SEQ ID NO: 31489 - DNA, 240 bp, synthetic construct
  source 1..240: mol_type = other DNA; note = Synthetic coding sequence
atgaacggcacactcgatcaccctgaccagccagacctagacgcgattaagatgttcgttgggcaggtgcccagaacctggtcggaaaaagacctgagagagctgttcgagcaatacggagccgtatatgagatcaacgtgctacgggaccgctcccagaaccctccacaatctaaaggatgctgttttgtgaccttctatacaaggaaggctgctttggaggcccaaaatgctttgtag

SEQ ID NO: 31490 - DNA, 738 bp, synthetic construct
  source 1..738: mol_type = other DNA; note = Synthetic coding sequence
atggttctcttgcatgtaaaaaggggagacgagtctcagttcctgctgcaggccccaggcagcactgagctcgaagaactgaccgtgcaggtggcacgcgtttacaatgggaggctcaaggtgcaacgtctgtgcagtgagatggaagagctggcagagcatggcatttttctgccacccaatatgcagggcctcaccgacgatcagattgaagagcttaagctcaaggatgaatggggagagaaatgcgtaccgagcggtggcgcagttttcaaaaaggatgacataggcagacgaaacggccaagcaccaaatgaaaagatgaaacaagtgctgaaaaaaacaatcgaggaggcaaaggcaataatttctaaaaaacaggtagaggctggtgtgtgcgttacaatggaaatggttaaggacgccctcgatcagcttcgaggcgcagtgatgattgtatacccaatgggactgccgccttatgatcctattaggatggagttcgaaaacaaagaggacctgagtgggactcaagccggattgaatgttatcaaagaagcagaagcccaattgtggtgggccgcaaaagagctgcgcagaacgaagaagctttcagactacgtgggtaagaacgagaaaacgaagataatcgccaaaatacagcaggtgtcaacattttgcttcaacgtgtctgtagtgttcgtgatcagtctgcagaccgacaagaacgtgcaatag

SEQ ID NO: 31491 - DNA, 396 bp, synthetic construct
  source 1..396: mol_type = other DNA; note = Synthetic coding sequence
atggctatgaccgcaggaaccacaactacattcccgatgtccaatcacaccagagaacgtgtgacagtagctaaattaacccttgagaatttctactcaaacctgatcctccagcatgaggagcgagagaccaggcagaaaaaattggaagtggctatggaagaagaggggctggctgacgaagagaagaagctgaggaggtctcaacacgccaggaaagaaacagagttcctgaggctaaagaggactcgcctcggtttggatgatttcgagagcctaaaagtaatcggcagaggggcattcggagaagtgcggttggtgcaaaaaaaagataccgggcatatatatgccatgaagattctgcggaagtcagatatgttagaaaaagagcagtag

SEQ ID NO: 31492 - DNA, 2517 bp, synthetic construct
  source 1..2517: mol_type = other DNA; note = Synthetic coding sequence
atgaccggagccgaaatcgaaccatctgcacaggcaaagcctgaaaagaaagcaggagaggaggtgattgctggacccgagagagaaaacgatgtaccattggtggtccgaccaaaggtccgcacacaagctaccacaggcgctcggcctaaaaccgaaacgaagtcagtccctgctgccagaccaaaaactgaggcgcaggcgatgagtggggctcgcccaaagactgaggttcaagttatggggggtgcccgtccaaagactgaagctcaaggtataaccggggctcgccctaaaacagacgccagggccgtcggaggagcacgatcaaagacggatgcgaaggccatcccaggagccaggccaaaagatgaggcccaggcttgggctcaatcagagttcggcactgaggcggtgtcccaggcagaaggagtgtcccagactaatgcggttgcctggcccctggccactgcagagtccggctctgtgactaagagtaaaggcctgtcaatggacagagaattggttaatgttgatgcggaaaccttccctggaacacagggacaaaaaggcattcagccttggttcggccctggagaggagactaacatggggtcttggtgttactcaaggcctagagcaagggaggaggcctccaatgagagcggcttctggagcgcagatgaaactagcaccgcttccagtttctggaccggcgaagaaacctccgttaggtcttggcccagagaggaatcaaacacgcgatcacggcacagagcgaagcatcagaccaaccccagaagtcggccaagaagcaaacaggaagcatatgtggactcatggtccggatccgaggatgaagcctcaaaccccttctcgttttgggtcggggagaataccaataacctcttccgtccacgggtccgcgaggaggcaaacattaggtcaaagctgcggaccaatcgggaggattgcttcgaaagcgagtctgaagatgagttctacaaacagtcttgggtcctccccggagaagaggcaaattcccggtttagacaccgagacaaggaggatcctaacacggcgctgaagctgcgggctcagaaggatgtggatagcgaccgggtgaaacaggagcctaggttcgaggaagaggtgatcattgggagctggttttgggccgagaaagaagccagcctggaaggaggagcttccgcgatttgcgaatcggagccagggactgaagagggcgcaatcggcggaagtgcttactgggcagaggagaaatcatctcttggcgctgtggccagagaggaggccaagcccgaaagtgaggaagaggccatcttcggctcctggttttgggaccgggatgaggcttgttttgatctgaatccttgccccgtatacaaggtgtctgaccgtttccgggacgccgcagaagaattaaacgcctcttccagaccccaaacatgggatgaagtgaccgtcgaattcaaaccaggcctgttccacggtgtcggttttcggtccacttctcccttcgggatacctgaagaggcctctgaaatgctggaagccaaaccaaagaatctggaattaagtcccgaaggcgaggaacaggaatctttgctccagccagatcaaccctcccctgaatttactttccagtacgacccatcttacaggtctgtgcgggagatccgagaacacctgcgagcccgtgagtccgctgaatctgagagttggagttgctcttgcatccaatgtgaactgaaaataggctccgaagaatttgaagagttcctgctgctaatggacaaaatccgcgacccatttatacatgaaatctctaaaattgcaatgggaatgcggtccgctagtcaatttactcgcgattttatacgggatagcggcgtggtctccctgatcgagacactgttgaactacccatccagccgcgtaaggacgtcatttctagagaatatgatccatatggcaccgccatatcctaacttgaacatgatcgagacattcatctgtcaggtatgcgaggaaacactggctcattctgtggatagtttggaacagctgaccggcatccgcatgctgcgccatttgactatgaccatagattaccacaccctcattgctaactatatgtccggattcctgtcgctcctcaccacagccaacgcaagaacaaagttccacgtgttgaagatgcttttaaacttaagcgagaatccggctgtggctaagaaattattctcagccaaagccctgtctatattcgttgggctctttaacattgaggagacaaacgacaatattcagatcgttatcaagatgtttcagaatatcagcaacataatcaagtctggcaaaatgtcactgattgacgacgatttttctttggaacctctcattagcgcatttagagaatttgaagaactcgccaaacaattgcaggctcagattgacaatcagaacgaccccgaagtagggcagcaaagctag

SEQ ID NO: 31493 - DNA, 1215 bp, synthetic construct
  source 1..1215: mol_type = other DNA; note = Synthetic coding sequence
atggacttcaatatgaaaaaacttgccagcgacgctggaattttttttacacgggcagttcagtttactgaagagaaattcggccaggccgagaaaactgaacttgatgcacattttgaaaacctgctggctcgcgcagattctacaaaaaactggaccgaaaagattcttagacaaaccgaggtactgctacagccaaatccttccgcccgagtggaagaatttctgtatgagaagctcgatcgaaaggtcccctcaagagttactaacggcgagttattagcccaatatatggccgacgctgcttctgagctgggaccaacaaccccctacggcaagacacttatcaaggtggccgaagccgagaagcagctgggcgcagcagaacgggatttcatccacaccgcaagtatctctttcctgacgccgctgcgcaactttcttgagggggactggaagaccatcagcaaagagcggaggctgctgcagaatagaagactcgatctcgatgcctgtaaggcacgcctaaaaaaggccaaggcagccgaagcgaaagctaccgcagaggggccaacagtccccgactttcaagaaacgcgcccacgcaattacattctgagcgcatcagcctctgccctgtggaatgatgaagttgataaggcagagcaggagctgcgggtggctcagacggaatttgacagacaggcggaagtgactcgcttgttattggagggtattagttcaacccatgtgaaccacctcaggtgcctccacgagtttgtcaaaagccagactacttactacgcccagtgctatagacacatgctggatctacagaaacagcttgggtcttcccagggcgctatctttccaggtacgttcgtaggcactacagagcccgcatcaccccctttatcgagcacatcccctactactgccgctgcgaccatgccagtcgtgcctagcgtggcttcccttgcgccacccggtgaggcaagtttatgcctggaggaagtagcaccacccgcaagcggtacgaggaaagctcgggtgctctatgactacgaggcagctgattctagtgagttggccttactcgccgacgaacttattactgtgtacagtctcccaggcatggatcccgactggctcatcggggagaggggcaacaaaaagggcaaagtcccggtgacctatctggagctgctgtcatag

SEQ ID NO: 31494 - DNA, 495 bp, synthetic construct
  source 1..495: mol_type = other DNA; note = Synthetic coding sequence
atgacatgctgccagacaagcttctgcggctacccatcgttcagcattagcgggacttgtggaagttcgtgctgtcagcctagttgctgcgagacctcgtgttgccaacctcgaagctgtcagacctcgttctgcggatttccaagtttttctacctcgggcacctgctcatcatcttgttgccagcctagctgctgtgagaccagctgttgtcagcccagctgctgccagatatccagttgtggaacaggctgcggcattggtggcggtatttcgtacggtcaggaagggtcctctggcgctgtgagcacacggatcaggtggtgtaggcccgactctcgagtggagggcacatacctgccgccatgctgcgttgtgagctgcacaccaccatcatgttgccaattgcatcacgcccaagcatcctgttgtcggccttcatattgtgggcagtcctgctgtagacctgtttgctgttgtgagccaacgtgctag

SEQ ID NO: 31495 - DNA, 846 bp, synthetic construct
  source 1..846: mol_type = other DNA; note = Synthetic coding sequence
atgctgacaaagctccaaatcaagcagatgatggaggcggctacccgacagatagaagaacgtaagaaacaacttagctttatttcccccccaactccccagcccaagacgccttcttcttcccagccggaacggttaccgatcggaaataccatccagccttcccaggctgccacattcatgaatgatgccatcgaaaaagcaagaaaagcagcggagctccaggcacgaatacaggctcaactggccctgaaacccggtctgattgggaacgctaacatggtagggctcgcaaacttacacgctatgggcattgccccacccaaagtcgagctgaaagatcaaacgaagcctaccccattgatcctggacgaacaggggaggacagtggatgccacaggcaaggaaattgagctgacacatcggatgccaaccttgaaagctaacattcgcgctgtcaaaagagaacagtttaagcagcagctgaaagaaaaaccaagtgaggatatggagagcaatacgttttttgacccaagagtctccatcgcaccaagtcagcgccagcggcgaaccttcaagtttcatgataagggcaaatttgagaaaattgcacagaggctaagaacaaaggcacaacttgaaaagctgcaggctgagatcagtcaggcagctcgaaagacagggatccacacgagtaccaggctggccttgatcgcaccaaaaaaagagctcaaggaaggagatataccagaaattgaatggtgggacagttacatcatcccaaatggatttgacttaggcaagtcacaggaacgtagactgttttggaatcataagtcctgctag

SEQ ID NO: 31496 - DNA, 693 bp, synthetic construct
  source 1..693: mol_type = other DNA; note = Synthetic coding sequence
atgcggggacacgagtcttccgtgttctctatatccgtgcacgcctccggaaagtatgctattactacatcaagcgacacagctcagctgtgggatctcgatacttttcagcgtaagcggaagcttaatattaggcaatccgtgggtatccagaaagtgttctttctgccactgtccaatacaatcttatcttgctttaaagacaattcaatctttgcttgggaatgtgatactctcttttgtaaataccagcttcctgcccctcccgaatcaagctcgattttgtataaggtgttcgcagtaaccagggacgggaggatactggccgcaggaggcaaatcaaaccatctccatctgtggtgcctggaggctcggcagctattccgaattatccagatgcccaccaaagtacgagccatcagacatcttgagtttctccctgacagttttgacgccggaagtaatcaggtgctgggggttctctcacaagacggcatcatgagatttatcaatatgcaaacttgcaaactgctctttgagatcggaagcctcgatgagggtatctcttcttcggccattagtccccacgggagatacattgcaagcataatggagaacggtagcctcaatatctactccgtgcaagctcttacccaagaaatcaataaggaagaagtccgcgcacagaattag

SEQ ID NO: 31497 - DNA, 1212 bp, synthetic construct
  source 1..1212: mol_type = other DNA; note = Synthetic coding sequence
atggactcaacaatggacgatgccgtggctggagattttgctctgattaataagctggacatacagtgtgacctgaagacactttcagatgatatcaaggagagcctggagtccgaaggcaaaaattcaaagaaagaggaaccccaagagctgctccaatcacaagattttgtcggagagaaattgggctcgggtgaacctagtcatagtgtgaaagttcacacggtccccaagcccggaaagggcgcagatctgtcaaagcccccttgtaggaaagcaaaagaaattcgtaaggaaaggaaaagactcaagctaatgcagcaaaatcctgctggcgagctggagggattccaggcccaaggacaccccccatctctttttccgcctaaggccaaatccaatcagcctaagagccttgaggatctcatattcgagtcactgcctgaaaatgctagccacaaacttgaggtgcgcgtggtacgaagctctcctccctcttctcagtttaaagcgaccctactggaatcctaccaggtatacaaacggtaccagatggtgatccataaaaacccccctgacacacccactgaatcccagtttacgcgcttcttgtgctcttccccactcgaggccgagacacctcctaatggcccagactgtggttacggatcctttcatcagcaatattggctggatgggaagattatcgctgtaggcgtgattgacattctgccgaactgtgtttcatctgtttatctatattacgacccggattactcctttctgagtctcggcgtgtatagtgcgttgcgggagatagccttcactaggcagctgcatgaaaagacttcccagctttcttattattacatggggttctatatacacagttgtcctaaaatgaaatacaaaggccagtaccgcccatcagatttactgtgtcccgagacctacgtgtgggtgcctatagagcaatgcttacccagccttgaaaactccaaatactgtcgatttaatcaggatcctgaagcagtggatgaggacaggagcacagaacctgataggctccaggtgtttcacaagcgggctatcatgccttatggcgtatacaagaagcagcagaaagatcccagtgaggaagctgcagtgctgcaatacgccagtctggtggggcaaaagtgctctgaacgtatgctactcttccgcaactag

SEQ ID NO: 31498 - DNA, 909 bp, synthetic construct
  source 1..909: mol_type = other DNA; note = Synthetic coding sequence
atgccactatacgagggcttaggctccggtggagaaaagacggctgtggtcatcgaccttggtgaggctttcacaaagtgcgggttcgccggtgagactggtccaagatgtatcattcccagcgtgatcaaaagggcagggatgcccaaaccggtaagagtggttcaatacaacattaacactgaggagctttattcctatctgaaggagttcatccatatcctgtattttcgccacctccttgtgaatccacgagatcgcagggtggttatcatcgagtccgtcttgtgcccttcccacttcagggagacactgacccgggttctgttcaagtactttgaggtgccttctgtgcttttggcgcctagtcacctcatggccctactgactctgggtataaacagcgcaatggtgttggactgcgggtacagggaaagtctggtcctcccaatatatgaagggatccctgttctgaattgttggggcgctctgcctctcggtggcaaagccttacacaaggaactggaaactcagctgctcgagcagtgtaccgttgatacgtccgtggcaaaggagcagagtctgccgagcgtgatgggaagcgtacctgagggtgttctagaggacattaaggctcggacctgctttgtcagtgacctgaaacggggattaaagatccaggctgctaagtttaatatcgatggtaacaacgagcgaccgtctcctccacctaatgtagattatccattagacggcgagaaaatcctgcacatcttgggatcaatcagggactccgtggtggagatcttgtttgaacaggacaatgaggagcagtctgtggccaccctgattctggattccctgattcagtgttgttcatgctgccctggatggtcagctatggcctag

SEQ ID NO: 31499 - DNA, 378 bp, synthetic construct
  source 1..378: mol_type = other DNA; note = Synthetic coding sequence
atgtcctcctgtgtaagtagccagccatccagcaacagagccgcacctcaggatgagctcggcggaaggggtagcagcagctcagagagtcagaaaccctgtgaggctcttcgtggtctttcaagtctcagcatccatctgggcatggaatccttcattgtggtgacagaatgtgagccagggtgtgcagtggacctcgggctagctcgagatcgacctctggaagccgacggtcaggaagtgcctctcgatacttccgggagtcaagctcgcccacacctcagcggaagaaaactttcactgcaggagcggagtcaggggggactcgccgctggcggttccctcgacatgaacggaaggtgtatatgtccatcctag

SEQ ID NO: 31500 - DNA, 1161 bp, synthetic construct
  source 1..1161: mol_type = other DNA; note = Synthetic coding sequence
atggcggactcactggaatctaccccccttccaagcccagaggacaggttggccaaattgcaccctagcaaggagttgcttgagtattatcagaaaaaaatggccgaatgcgaggcggagaacgaagatctccttaagaaactggagctgtacaaagaggcctgcgaaggtcagcacaagctcgaatgcgacctacagcaaagagaagaggaaattgctgagctccagaaggccctgtcagatatgcaggtgtgtcttttccaagagcgggaacacgtgctgcggctgtactccgagaatgaccggctgaggatccgtgaattggaagacaagaagaaaatacaaaacttactcgctctggtcggcacggatgctggcgaagtgacttacttctgtaaagagccacctcacaaagtcaccatcctgcagaaaactatccaggctgtgggggagtgtgagcagtccgagtcaagtgcattcaaagcagacccaaaaatctcgaagcgcagaccttcaagagaacgaaaggagtcttccgaacactaccaacgcgatattcagacactcatactgcaagtggaggcactccaggcccagctcggcgaacaaaccaagctgagtcgcgaacagattgaaggactgattgaagaccggcgaatacatctggaagaaatacaggtccagcaccagcggaatcagaacaagataaaggagcttaccaagaacttgcaccacacacaggaacttctttatgaatccactaaggactttctacagctgcggagcgagaaccagaataaagagaagtcctggatgctggaaaaggataatttgatgagtaagataaagcaatacagagttcagtgtaaaaagaaggaggacaagataggaaaggtgcttcccgtgatgcatgaatcccaccatgctcaaagtgagtatatcaaaagccttaaggataaacttgtacaggagaaaaaactatccaatatgtatcaggagcagtgcattagcctggaagaggagttggcgagaattagggaagaggagggtatgagacgtgaaattttcaaagaccgaacaaacaaaatgggaaaaaggcttcagatcatgacaaagcggtacgaggccttagagaggcggaggatccttgaggttgaatag

SEQ ID NO: 31501 - DNA, 999 bp, synthetic construct
  source 1..999: mol_type = other DNA; note = Synthetic coding sequence
atggagtacctcggagggggtagtgctcttgacctgttaaagcccggtcccctcgaagagacatacatcgccaccattttacgcgagatcctgaaggggctggactatctgcactctgagagaaagattcatcgcgacataaaggccgcaaatgtgctcctgagtgagcagggcgatgtcaagcttgcagacttcggggtggctggtcagctgacagacactcaaatcaagcgcaacacctttgtcggcacgccattctggatggcccctgaggtgattaagcagagtgcctacgattttaaggccgacatctggtcccttggaataaccgcaatcgaattggcaaagggagaaccccctaattccgacttgcacccaatgagagtgctctttctgataccaaagaatagtcctccaaccctggagggacaacactctaagccattcaaggaattcgtggaagcatgtctaaataaggatcctagattcagaccaactgccaaggagttactgaagcataagttcatcacaaggtatactaagaagaccagttttctcactgaattgatcgacaggtataaacgatggaagtccgaaggccatggcgaggagtcatcctccgaagattccgacatagatggagaagcagaagacggagagcagggccctatctggacttttcctcctaccatccgcccaagtcctcatagcaagctgcataaagggaccgccctgcatagctctcaaaaacccgctgagccagtaaaacgacagcctaggagtcagtgcttgagtaccttggtgaggccagtttttggcgagcttaaagagaaacataaacagtccgggggatctgtcggggctctggaggagctagagaacgccttttcgctggcagaggaatcctgccctggtatttctgataagctgatggtgcacttggttgaacgggtccagcgtttttcacacaatagaaatcacctgacaagcaccaggtag

SEQ ID NO: 31502 - DNA, 1524 bp, synthetic construct
  source 1..1524: mol_type = other DNA; note = Synthetic coding sequence
atggaagaggtggaacggcaagtccttcctgatcccgaggtactcgaggcagttggcgatcggcaggacgggctgagagagcagcttcaagcccctgtcccaccagactccgtgccaagtttacaaaatatgggcttactgctcgataagctggccaaggagaatcaagatattcggttgttgcaggctcagctgcaggcccagaaggaagaacttcagtcactcatgcatcagcccaaggggctggaggaagaaaacgcacaactcagaggggctctacagcagggcgaggcttttcagcgggctctcgaaagtgagctgcagcaactcagagcacggctgcagggcctggaagccgactgcgtgcggggacctgacggtgtctgcctcagcgggggtagaggccctcagggcgacaaggcaatcagggaacaggggccacgtgagcaggagccagagctgtctttcctcaagcagaaggaacagctcgaggcagaagcacaagccctacgtcaagaattggagcggcagagacgactcctggggtccgtgcagcaggatcttgagcggtcattgcaggatgcgtcgcggggagatccggcacatgctggactggctgaactaggccaccgacttgcacagaagctccagggtcttgagaactggggccaagacccgggagtctccgccaatgcatcgaaggcttggcaccaaaagtctcatttccagaatagcagagagtggtctggaaaggaaaaatggtgggacgggcagcgggaccgtaaggccgagcactggaagcacaaaaaggaagagtcagggagggaacggaagaaaaactggggaggacaggaggacagagagccggcaggacggtggaaggaagggaggccccgtgttgaggagtcaggcagtaaaaaagagggaaagcgacagggccctaaggagccacccaggaagagcggcagcttccacagcagtggggagaaacaaaagcagccgagatggagggagggcacgaaggattcccacgacccactgccctcctgggctgagctgttgcgacctaagtacagggccccacaaggatgctctggcgtggacgaatgcgccagacaagaaggcctaacattctttgggaccgaactcgcaccggtgaggcagcaggaacttgcatcactcctccggacttatttggccagactgccctgggctgggcagctcactaaagagctgcctctgtctcctgccttcttcggcgaggacggcatatttcggcacgatagacttcggtttcgcgacttcgtcgacgcactggaggacagtctggaggaggtcgctgtgcagcagaccggtgatgacgacgaagtcgatgatttcgaagatttcattttctcccattttttcggggataaggcgctgaagaagcgcagtggcaagaaagataaacactcccaaagtccgcgagctgccggacctagggagggacacagccatagtcatcaccaccaccaccgtggttag

SEQ ID NO: 31503 - DNA, 2472 bp, synthetic construct
  source 1..2472: mol_type = other DNA; note = Synthetic coding sequence
atgactcttctaagttctcaatccagctcactggtggccccaagcggctctgtgtccgctgaaaatccagaacagaggatgctagagaagagggctaaggtgatcgaggaactgctccagactgagagagactatataagggatctcgagatgtgtatcgagcggattatggtgccaatgcagcaggcacaggtccctaacatagatttcgaagggctattcggtaacatgcagatggtgattaaggtgtctaagcaactcctcgcggcactggagattagcgatgctgtcggacccgtctttttgggccaccgcgacgagctggaggggacttacaaaatttattgtcagaaccacgacgaggccattgctctgctggagatttacgagaaggatgagaagatccaaaaacacctccaggactcactggcagacttaaaatcgttgtataatgaatggggatgcactaactacattaacctaggcagcttcctgatcaaacctgtgcagcgagtgatgagatacccccttctactgatggagctgctgaacagtacccctgaatctcatcccgacaaggtgcccttaacgaatgcagtgcttgcggtcaaagagatcaatgttaatatcaacgagtataagaggaggaaagatctggtgcttaagtacagaaaaggggatgaagactccctcatggagaagatcagcaagctcaatattcacagcattattaaaaaatccaacagggtgtccagtcacctcaaacacctgacggggtttgcacctcagatcaaggacgaggtctttgaagagaccgaaaaaaactttagaatgcaggaaagacttataaaaagctttatcagggacctctccttatatctacagcacatacgagagagcgcttgtgtcaaggtggtggccgcagttagtatgtgggatgtatgtatggagcgcggtcatagggatttagagcagttcgagcgcgttcatcggtacatatcagaccagttatttactaacttcaaggagaggaccgaaagactcgttatctctccattgaatcagctgctgtctatgttcaccggtccccacaaactcgtccagaaacgattcgacaaacttctggatttttataattgtaccgaaagagccgaaaagttgaaagacaaaaaaaccttggaagagttacagtccgctcgcaacaactacgaggcactgaatgcccagttactggatgagctgcccaaattccatcagtatgctcagggcctgtttaccaactgcgtccacgggtatgccgaggctcactgtgattttgttcaccaagctctggagcaacttaaaccgttgctgagcttgctcaaagtagcgggtcgcgaggggaatcttattgctatttttcacgaggaacactctcgagtgctgcaacaactgcaggtatttacatttttcccggagtctttaccggcaactaagaagccctttgaacggaaaactattgatcggcaatccgcaaggaaaccgcttctaggcctgccatcctacatgctgcagtcagaggaattgcgggcatcccttctggcacgctacccacctgaaaagctcttccaggccgagagaaattttaatgctgcccaggatctggacgtgtctctgctggagggagaccttgttggagtaatcaaaaagaaagatccgatgggctcgcagaacaggtggctgatcgataatggagtgacgaaaggcttcgtttatagctctttcctcaagccatacaacccaaggagaagccacagtgatgcctctgtgggaagccattcaagtaccgaatccgagcatggcagtagttcccccagattcccgaggcaaaattccgggtcgactctgacattcaatccatctagtatggcggtgtctttcaccagcggaagctgtcagaagcagccacaggacgcctccccaccacccaaggaatgtgatcaaggaaccttgagcgcttctctgaatccatccaacagcgagtccagtcctagccggtgccctagtgatccagacagcacatcacagccaagatccggagactccgccgacgtggctcgggatgtcaaacagcctacagcaactccaagatcgtatcggaacttccggcaccccgaaatcgtgggctactccgtccccggacggaacggacagtcccaggacctggtgaagggttgtgccaggactgcgcaggcaccggaagaccgaagcacagaaccagatggaagcgaggccgagggcaatcaagtgtactttgccgtatacacgttcaaagctcggaatcccaacgaactgtctgtgtccgccaaccaaaaattgaaaatccttgagtttaaggatgttacagggaatacagaatggtggctggccgaagtgaacggtaaaaaggggtatgttcctagcaattatattcgtaagacagaatacacttag

SEQ ID NO: 31504 - DNA, 492 bp, synthetic construct
  source 1..492: mol_type = other DNA; note = Synthetic coding sequence
taggataagtttcgcgcttctcccgattgcattacgatattatgtaagcccaacggacaggcgatcgcgtggtacacgcccatccattggaagcaggcttgggagaaactcgatgccgatgtcgaattcaatagatgtagcgtggtcagtcctacatttcggaaacgcgtcttccagtggaccgcctctaccgctacaattactaaggaaaagcaggatcagccaaaaaaagacatctccaattaccaggttgaacaggcacaggtgcttctgaaacgggaaaaggagattccacctacagtgtttcctaatcggagcccttggtgccaaaacccctacgtgtccgcacacccatactgcccactgatcgaaccacataacaccagcaccgctgggggaagactggaccggcagccacgtacaaggtctacgcgacctaaccgggcttctggaagcaagaaaaaaaagacctccgagtctcagaagcagtag

SEQ ID NO: 31505 - DNA, 771 bp, synthetic construct
  source 1..771: mol_type = other DNA; note = Synthetic coding sequence
atggccacgcagagaaaacacctggttaaggactttaatccgtatatcacttgctatatttgtaaaggttacttaataaaaccaaccacagttacagagtgtctgcacacgttctgcaagacatgcatcgttcagcacttcgaggatagcaatgactgcccaagatgcggaaatcaggtgcatgagacaaaccccctagaaatgctgagactagataatacgttagaggagatcatcttcaagctggtgcctggattgagagaacaggaattagagcgcgaatctgaattctggaaaaagaacaagccacaggaaaatgggcaggatgacacatccaaggcggataagcccaaggtggatgaagagggcgacgagaacgaggatgacaaagactatcaccgctctgaccctcagatcgccatttgtctggattgtctccggaataatggtcagtcaggtgacaatgtggttaaaggcctaatgaagaagttcattcgatgtagcacacgcgtcacagtcggaaccataaagaagttcctgagcctgaagttgaagttgccttccagctacgaactagacgtgttgtgcaacggggagatcatgggtaaggaccacaccatggagtttatctacatgactagatggcggctgcgcggagaaaattttcggtgcttgaactgctcggcaagtcaggtttgttcccaggatggccctctctaccagtcttacccaatggtgctgcagtaccgacctcgtatagatttcggctag

SEQ ID NO: 31506 - DNA, 2793 bp, synthetic construct
  source 1..2793: mol_type = other DNA; note = Synthetic coding sequence
atgtctgaatttcgtatccatcacgacgtcaatgaactcctctccctgctcagagtacacgggggtgatggggcagaggtttacatcgatctcctgcagaagaaccggacgccgtacgtcacgactaccgtgtcagcacacagtgcaaaggtaaagatcgctgaattctcacgtacccccgaggacttcctcaaaaaatacgatgaacttaagtccaagaatacccgtaatctggatcccctcgtgtacttgcttagcaaattaactgaggacaaggagacgctccagtacctccaacaaaacgctaaggaaagggcagagctcgctgctgccgctgtgggtagcagtaccacttccattaacgtgcccgctgctgctagtaagatatccatgcaggaactggaagaactgcgcaagcaactcggttcagttgcaacaggcagtacactgcaacagtccctggagctgaaaagaaaaatgctgcgtgataaacaaaataaaaagaattctggtcagcatctgccaatatttcccgcttgggtttacgagagacccgcactaataggggacttcttgattggtgctggcatcagtaccgacacagcactgcctattgtgttgctgagatggaacctggcattgtccccccgacttaagtgttccggcgtgattagtgctcattgtaatctacacttaccaggaacgcttcccctcgctagtcaggagagcgccgtggtcgaggacctactctatgtcctggtgggagttgatgggaggtatgtcagcgcccaacctctcgccggacgacaaagccgcacgtttctggtcgacccaaatttagatctgagtatccgggagctggttcatcgaatcctccccgttgctgcctcatacagcgccgtcacaaggttcatcgaggagaaatcctccttcgaatacggacaggtcaaccatgctctggccgcagctatgaggactcttgtgaaggagcacctcatcctggtctctcagttagaacagctccataggcaaggcctcttaagtcttcagaaactgtggttctatattcagcctgcaatgaggacgatggacatcctcgcatccttggctacaagcgtggacaagggggagtgcctgggtggcagcacgctgtccctgctgcacgatcgatctttctcctacactggcgactctcaggcacaggaattatgtctgtacctgaccaaagccgcaagtgcgccatactttgaagttctagagaagtggatatacaggggtatcattcatgacccgtattcagagttcatggtggaagagcacgaactccgaaaagagcggattcaggaggattataacgacaaatactgggatcaaaggtataccattgttcagcaacaaatcccatcgttccttcagaaaatggctgataagatactgtccaccggcaagtacttaaatgtcgtgcgggaatgtggccatgatgttacatgcccagtcgccaaagaaatcatatacaccttaaaggaacgtgcatacgtagagcaaatcgagaaagcgttcaactacgcaagcaaggttctgctcgatttccttatggaagaaaaggagttagtggcacacctgaggtccattaagagatactttctgatggaccagggtgatttcttcgttcattttatggacctggcagaagaagagcttcggaagccggtggaggacatcacaccaccccgtctggaagctctcctggaactcgcgctcaggatgtcaacagcaaacaccgacccctttaaggacgacttgaagatcgatcttatgccacacgacctgataactcaactgctcagggtgttagcaattgagacaaaacaggaaaaggccatggcccacgcagatcccacggagcttgcactgtctggcctggaagccttctcttttgattatatcgttaaatggccgctgtccctcatcataaacaggaaggctttaactaggtaccagatgctctttagacacatgttctattgtaagcacgtggaacgccagctgtgcagtgtgtggattagcaacaaaaccgccaagcagcactccttacactccgcacaatggtttgctggggcttttacgcttcgccagagaatgctgaatttcgtgcagaatatccagtattatatgatgttcgaagtcatggagcctacttggcacatcctggaaaagaacttgaaatcagcaagcaatattgatgatgtcctaggccatcacactgggttcctggatacatgcctgaaagactgcatgttgaccaatcctgagttacttaaagtattttctaagttaatgtccgtctgcgtgatgtttacaaactgcatgcagaaatttactcagtcaatgaaattggacggcgagctgggcggtcagactttggagcactccaccgtcctgggactccccgcaggggctgaagagagggctcgcaaagaactcgccaggaagcacctggctgagcacgccgacaccgtgcagctggttagtggatttgaggctacaattaacaaattcgacaaaaacttctcagcccacctcttagacctgcttgccaggctgtcaatctactccacaagtgactgtgaacacggcatggcgagcgtaatctcccggttggactttaatggattttacaccgagcgtctggaacgattgtcggccgaacgcagccaaaaagccactccacaggtgccggttttacgcggaccgccagctccagcccctcgcgtagccgtgactgcccaatag

SEQ ID NO: 31507 - DNA, 129 bp, synthetic construct
  source 1..129: mol_type = other DNA; note = Synthetic coding sequence
atgtgcctcctgcctatcagagtgaaggaggcagaggaggtctgtcgacagaaaaagggcaaatctctgtacaagataaaaccgcgacacgacagtgggattaaagcgaaaattagtatgaagacatag

SEQ ID NO: 31508 - DNA, 456 bp, synthetic construct
  source 1..456: mol_type = other DNA; note = Synthetic coding sequence
atggattgccgcgaaatggatttatacgaggattaccagtcgcccttcgacttcgacgctggcgttaacaagtcttacctgtatctgtccccctcaggaaatagttcccctcccggatctccgactctccagaaattcggcctgctgcggactgacccggtgcccgaagagggcgaggacgtggctgctacgatatctgccactgaaaccctttctgaggaagagcaggaagagctccgcagggagctggccaaagtggaagaggaaattcagaccctctctcaagttctagccgctaaagagaagcacctcgcagaaattaagagaaagttgggcataaatagcttgcaagagcttaaacagaatatagccaaaggctggcaagacgtcaccgctaccagcgctaggtcaaagctgcttgcagcagagacagaactgttgtgtttactctactag

SEQ ID NO: 31509 - DNA, 627 bp, synthetic construct
  source 1..627: mol_type = other DNA; note = Synthetic coding sequence
atgagcgcaggcggtgacttcggaaacccgctcagaaaattcaagctcgtgttcctgggcgagcaatccgtgggcaagacttccttgattacaagattcatgtatgactccttcgacaatacgtatcaagctactatcgggatcgacttcctgtctaaaacgatgtatctcgaagatcgcacagtccgcctgcagctgtgggacacagcagggcaggagagatttaggagcctcattccttcatatatccgggatagcactgtcgctgtcgtggtctatgacattacaaatctcaactcattccaacagacctctaaatggattgacgatgttcgcactgagagagggagcgacgtaataatcatgttggtcgggaacaagacagacctggctgacaaaaggcagattaccatagaggaaggagagcagagagccaaggagctgtctgtaatgtttatcgagacctcggctaagacaggatataatgtgaaacaactgtttaggagagttgctagcgcactgcctggcatggagaacgtgcaggagaaatccaaggagggcatgatcgatatcaaactggacaagccccaggaaccccctgcctccgagggaggatgctcttgttag

SEQ ID NO: 31510 - DNA, 1575 bp, synthetic construct
  source 1..1575: mol_type = other DNA; note = Synthetic coding sequence
atgaagcggtcatccgtttccagcggaggcgctggaaggctgagcatgcaggagctcagatcacaagatgtgaacaagcaggggttgtacacccctcaaaccaaggaaaaaccaacttttggtaagttgagcatcaacaagcccacctcggagcgcaaggtaagtttgtttggcaaacgcacttcagggcatggctctagaaactcacagctcggtatttttagcagcagcgaaaagattaaggaccctagacctttgaacgacaaagcattcatccagcaatgcatcaggcagctttgcgagtttctgaccgagaacggctatgcacataacgtgagcatgaagagcctacaggctcctagcgtcaaggattttctgaagatttttacctttctatacgggttcctttgcccgagttacgagttgccagataccaagttcgaagaggaagtgcctcgcatctttaaggatctgggttacccattcgctctgtctaagtcatcaatgtacacagtgggggctcctcacacttggcctcatattgttgccgcactggtgtggctgatcgactgcataaagatccacaccgccatgaaggagtcttctccattgtttgacgacgggcaaccctggggcgaggaaaccgaagatgggattatgcacaataagctctttctcgattacaccattaagtgttacgagagtttcatgtcaggtgctgactccttcgacgagatgaacgcggaattacagagtaaactgaaagatctttttaacgtcgatgcctttaagttggagtcactggaagcaaagaatagggcactgaatgaacagatagccagactggagcaggaaagggagaaggagcccaatcgtcttgagtctctccgcaagctcaaggcctccttgcaaggcgatgtgcaaaaatatcaagcatatatgtctaatctggagtctcactcagcaatcctggaccagaagctgaacggacttaatgaagagatagctcgtgtggagctggaatgtgaaacaatcaaacaagagaacactagactgcagaacataatagataaccagaagtatagcgtggctgacattgaacgcatcaatcacgagaggaacgaactccagcagaccattaacaagctcactaaagatctcgaggccgaacaacagaaactctggaatgaagagctcaagtatgcacgaggaaaggaagccatagaaacccagctagcggaatatcacaagcttgccagaaagctaaaattaatccccaaaggggctgagaactctaagggctacgactttgaaattaaattcaacccagaggccggagccaactgtctggtgaagtaccgtgcccaggtttacgttcccttaaaagaactactgaatgagacggaagaagagattaataaggccctcaataaaaaaatggggctggaggacacactggagcagctgaacgccatgattacagagagtaagcgctctgtgcgcacccttaaggaagaggtgcaaaaacttgacgacttataccaacagaagattaaaaaagagaggaagaaatag

SEQ ID NO: 31511 - DNA, 1248 bp, synthetic construct
  source 1..1248: mol_type = other DNA; note = Synthetic coding sequence
atgatgctgggcccagaaggaggcgaggggttcgtggtcaaattacgaggactgccgtggtcatgtagcgtcgaggacgtgcagaacttcctgagcgactgcactattcatgacggagcggctggtgtgcattttatttacacgcgtgaaggtcggcagtccggggaagcgttcgtggaactgggcagtgaggacgacgtaaagatggccctgaaaaaggatcgtgagtctatgggccatagatacatcgaggtgtttaaaagccacagaaccgagatggactgggtgctgaaacactctggcccaaattcagcagattccgccaacgatggttttgtgcggttgagaggcttgcctttcggatgcacgaaagaggagatcgtgcagttcttcagcggcctcgagattgtgcctaacggcatcacgttgccagtcgacccagaaggaaagataactggagaagcattcgttcagtttgcttcccaagaacttgccgagaaggctctgggcaaacacaaagaaaggatcgggcaccggtacatcgaggttttcaaatctagtcaagaagaggtcaggtcctatagcgacccccctctcaagtttatgagcgttcagaggccagggccatacgataggcctggaacagcgagaaggtacatagggattgtgaagcaggcaggtctggagcgaatgaggcccggagcatacagcactggctatggtggttacgaggaatactcaggactctctgatggatatggatttactacagatctgtttgggcgagacctgtcctactgtttgagcggcatgtacgatcaccgatacggcgactccgagttcactgtccagtctaccaccggtcactgtgtgcatatgaggggcttgccgtacaaggcgacggagaacgatatctacaacttcttttcaccattaaatccagtccgggttcacatcgagatcggcccagacggtcgagtgactggtgaggctgacgtcgaattcgctacccatgaagaggcggtagccgctatgtctaaggatagggctaacatgcagcatcgctacattgagctgtttctcaattccactacaggcgcttccaacggtgcctatagttcccaggtgatgcaaggtatgggggtcagtgcggcacaagccacttactcgggcttagaatcccaatcagtgtcaggatgctatggagccggatatagcggccaaaatagcatgggcggatatgattag

SEQ ID NO: 31512 - DNA, 1512 bp, synthetic construct
  source 1..1512: mol_type = other DNA; note = Synthetic coding sequence
atggctagtaaccataaaagctcggcagcccgtcccgtgagccgtggcggtgtcggactcactggccgaccaccttctggcatacgcccattgagcggcaacatacgagtggctaccgcaatgcctcctggtaccgccagacctggatcacgtgggtgcccgattggcacaggcggagtcttgtcgtcccagataaaggtggctcatcggcctgttactcagcagggtctgaccggaatgaaaactggaactaagggcccacagcgccagatattggataaatcctactacctgggtctcctgagatctaagatatctgaactcacaaccgaagttaataagttacagaaggggattgaaatgtataaccaggagaattccgtctacttatcgtacgagaagcgcgctgagactttagctgtggagattaaagagttgcagggccagcttgctgattataacatgctcgttgacaagttgaacacaaacacagaaatggaggaggtcatgaacgactacaacatgctcaaggcacagaatgatcgggaaactcagtctttagatgtaatctttacagagaggcaggctaaggaaaaacaaatccggtcagtggaagaagaaatagagcaggagaagcaagctacagatgatataatcaagaatatgagtttcgagaatcaggttaagtacctcgagatgaagacaactaacgaaaaattacttcaggagctcgacaccctgcagcagcaacttgactctcagaacatgaagaaggaatcgctggaggcagagatcgctcattcgcaggtcaagcaggaggcagtactgctccatgagaaactctatgagcttgagtctcatagagatcagatgatcgctgaagacaaatcaatcggctcacctatggaggagagggagaagctcttgaaacaaatcaaggacgataatcaggagattgcctccatggagcgccagctgaccgacaccaaagagaagattaatcaattcattgaggaaatacgtcaactcgacatggatctcgaggagcaccagggagagatgaatcagaaatacaaagagcttaaaaaaagggaagagcacatggacacctttattgagactttcgaagagacgaaaaaccaagagttaaagaggaaggcccagatcgaggccaatatcgtcgcactattggagcactgctcgagaaacataaatcgcattgaacagatcagcagcatcaccaatcaagaattgaaaatgatgcaggacgaccttaattttaaatccaccgaagttcagaagtcccagagtaccgctcaaaacctaacttctgatatccagcgcctgcaactcgatttacaaaagatggagctcctagaaagcaagatgactgaggaacagcatagcttgaaatctaagatcaagcagatgaccaccgatctggagatctacaatgatctgccagcactgaagtccagcggggagaagaagaaaaagaagaagaaaaaatag

SEQ ID NO: 31513 - DNA, 1461 bp, synthetic construct
  source 1..1461: mol_type = other DNA; note = Synthetic coding sequence
atgacctgtgggtcttattgcgggggtagggccttttcgtgtatcagtgcttgcggccctaggcccggtcgctgctgcataaccgcggcaccttatcggggaattagctgctataggggcctcacaggagggttcgggtcccacagtgtgtgcggcggattcagagcaggctcttgcggacgctcgtttgggtataggagtgggggtgtgtgcgggccaagcccaccctgtatcaccaccgtgtcagttaacgaaagtctgctgactcctctcaacttggaaatcgatcccaatgcccagtgtgttaagcaggaagagaaagagcagataaaaagtttaaattcccgattcgccgctttcatcgataaggtgagattcctggagcagcagaacaaactgctggaaactaagctgcagttctatcagaatagggagtgttgccagtccaacttggaaccgctctttgaaggatacattgagacccttcgtagagaggctgaatgcgtggaggcagatagcggcagactggcttcagaacttaatcacgtccaggaggtgctggaggggtacaagaaaaagtacgaggaggaggtgtcactgagagcaacagctgagaatgagttcgtagccctgaagaaggacgtagattgcgcatatttgaggaagtccgatctggaggcaaatgtcgaggccctgatccaggaaatagacttcctaaggaggttgtacgaggaagaaatccgtgtgctgcagtctcatatctctgatacctctgttgtcgtgaaactcgataatagtagagatttgaacatggactgcatcattgctgagataaaagctcagtatgacgacatagtgacgcgctcaagagccgaagccgagagctggtatcggtcaaagtgtgaagagatgaaggctaccgtgatacgccatggcgaaactctgcgcaggactaaggaagaaataaatgaactcaaccggatgatacagcgtctcacagccgaggtcgaaaatgctaagtgtcagaactcaaaactggaagctgctgtggcacaaagtgagcagcagggcgaggccgcattatctgacgctaggtgcaagctggccgaacttgagggggcactccagaaggccaagcaagacatggcttgcctcatccgcgagtaccaggaggtcatgaactcaaaactgggactcgacatcgagatagcaacttatcgtcggttgctcgaaggagaggagcagagactttgtgagggagtgggatctgtcaacgtgtgcgtctctagcagtcggggaggagtggtgtgtggtgacctgtgcgctagcaccacagcacccgtggtgtctacacgagtgagcagtgtaccatctaacagtaatgtcgtcgtgggaaccacaaacgcttgtgctccatctgctcgtgtcggtgtctgtggaggcagttgcaagcgctgctag

SEQ ID NO: 31514 - DNA, 1011 bp, synthetic construct
  source 1..1011: mol_type = other DNA; note = Synthetic coding sequence
atgtgtacaatgcacaaggacgaaaaagccaagcgggaggtctcttcctggacagtggaaggagatattaacacagatccttgggccggataccggtacaccgggaagctgagacctcactatcctctgatgcccactcggccagtaccaagttacatccagaggcctgactacgccgaccaccctctgggaatgagcgagagcgaacaggcgttgaaggggacatctcagatcaagcttctgagtagcgaagatattgaaggcatgcggctggtctgccgactggccagagaggtgctggatgttgccgcaggaatgattaaacctggtgtgacaactgaggagattgatcacgccgtgcacctggcctgcatagccaggaactgttaccccagccccctgaactactataacttccctaagtcctgttgcacctcggtgaacgaggttatatgtcacggcattccagacagaagacctctgcaggagggcgacatcgtgaatgtggacatcacactgtatcgaaacggctatcatggagacctcaacgagactttcttcgtgggagaggtggatgacggggctcgcaagttagtgcagactacatatgagtgtctgatgcaggcaatcgatgctgtaaaacccggtgtccgctatcgggaattgggtaacatcatacaaaaacacgcacaggccaacgggttcagcgtggtcaggtcctactgcggacatggtatccacaagctgtttcacactgctccgaacgtgccacactacgccaagaacaaagccgtcggcgtgatgaaatccgggcatgtcttcacaatagagcctatgatctgtgagggtggttggcaagatgagacttggcctgacggttggactgccgtgactagggacggcaagaggagcgcccagtttgaacataccttgcttgtgaccgacaccggctgtgaaatactgacccggagactggattccgcccgaccccacttcatgagtcagttctag

SEQ ID NO: 31515 - DNA, 3102 bp, synthetic construct
  source 1..3102: mol_type = other DNA; note = Synthetic coding sequence
atggctggcatgattgaccgcttttcaccagctaatacaggaatccgatcttgggacgttgaccctggggtgtgtaatcttgacgaacagctgaaagtttttgtaagccgtcactccgccaccttctccagcattgtgaagggccaacgatccctgcatcataggggggacaaccttgagacgctggttctgctgaacccatccgataaatctctctatgacgagctcagaaatctcttactggaccccgcatcccataaacttctcgtgctggctggcccatgtcttgaggaaaccggtgagctgctgctccagaccggtggcttttctccgcatcacttccttcaggtgcttaaggaccgagagatccgagacatcttggctactaccccgcctccagtccagcccccaattcttaccattacctgtccaacgttcggagattgggcacaacttgctcccgcagtacccggattgcagggcgcactcaggttacagctgcggctcaatcccccagcgcagctccctaactctgaaggcttatgcgagtttcttgagtacgtggcagaatcccttgaacccccttcaccgttcgaactgttggaaccccctacctccgggggatttctccgcctgggaagaccgtgttgctacatttttccaggcggtctgggagatgcagctttttttgctgtgaatggctttacagtgctggtgaacggcggaagcaaccccaaatccagtttttggaaactcgtgcgccacctcgacagggtcgacgccgtgctggtgacccatcccggtgccgattcccttcctggtctgaattcactcctgaggagaaagctggcagagcgctccgaagttgccgctggaggcggaagctgggacgatcggctccgcagactcatctctcctaaccttggcgtggtgttttttaacgcctgtgaagccgcatcacggctggcaagaggcgaggacgaggcagagctcgctctatcactcttggcccagttaggtataactcccctgccgttgtcccgtggccctgttcccgcaaagccaactgtcctgttcgaaaagatgggcgtcggcaggctcgacatgtacgtgttgcatcctccgagcgctggcgcagagaggacacttgctagcgtctgcgccctgctagtctggcaccccgcaggccctggcgagaaggttgtgagggtactctttccgggatgcacacctcctgcgtgtctgctggacggtttagtgcggctgcagcatttgagattcttacgagagcccgtggtaactccccaggacctggagggacccggacgggctgaatctaaggaatccgtgggatctagagacagctctaagagagagggcctgcttgctacgcaccccagacctgggcaggaacggcctggtgtggcccgtaaagagcccgcacgtgcagaggcccctagaaagaccgagaaggaggccaaaaccccccgtgagctcaagaaggatcccaagccatcagtgagtaggacccagccacgggaggtgcggagagccgcaagctcagtgcctaatcttaagaaaactaacgcgcaggcagcaccaaagccacgtaaggctccttccacaagccactcgggcttccccccagtcgcaaacggcccacgctcccccccatctctcaggtgcggtgaagcttcgcctccgtcggccgcatgtggctctcctgcgtcccagctcgtggccactccatctttggagctgggacccatccctgctggcgaagagaaggccctggagcttcctttagctgcgtcttctatccctcgcccacgcaccccttcgcctgaaagccaccggagccctgctgagggtagcgaaaggttatctctctccccactgcgcggaggtgaggcaggccctgatgcttcgccgacggttacaacacccaccgttacaaccccctctctaccggctgaggtgggatccccacactctacagaggtggacgaatctctctcagtgagctttgagcaggtgctgccaccaagtgcaccaacttctgaggccggactgtccttgcctctcagaggaccacgggctcggaggagcgcaagtccacacgacgttgatttgtgcttggtgagcccttgtgagtttgaacacaggaaagcagtcccaatggcacctgctcccgcttccccaggctcaagcaacgacagcagtgcgcgatctcaggagcgcgctggtggtctgggtgcggaggaaacccctcccacttcggtgtccgagtccctgcctacactgagcgattctgacccagtgcccctggcacccggtgcggcagacagcgacgaggacaccgaaggttttggggtgcctcgccacgatccacttcctgaccccctgaaggtaccgcctcccctgccagacccgagttctatttgcatggtggatccagaaatgctgcctcctaaaaccgccaggcaaaccgaaaacgtgagtaggacccgaaagcccctggccaggcctaacagccgcgctgccgctcccaaggcaacccctgttgcagccgcaaagaccaagggtcttgccggaggagaccgtgcttcccggccactgagcgccaggtccgaacccagcgagaaagggggacgggcaccactctccagaaaatccagtacacccaagacagcgacccgtggaccttctggttccgcctcaagccggccaggagtgtccgccacacccccaaaatctccagtgtatctcgacctggcttacctacctagtggctcatccgcacatctggtggacgaagaatttttccaacgcgtgagggcactctgctatgtaatctctggtcaggaccagcggaaggaggaagggatgcgcgctgtacttgatgccctgctggctagcaagcagcactgggaccgggacctgcaggtgacgttgattccaacttttgattcagtggcaatgcacacctggtatgccgagacacatgcaaggcatcaggcacttggaattacagtcctcggctccaactcaatggtgtcaatgcaggacgatgccttcccagcgtgcaaggtggaattctag

SEQ ID NO: 31516 - DNA, 2223 bp, synthetic construct
  source 1..2223: mol_type = other DNA; note = Synthetic coding sequence
atgagggatctcgaggggtatagagaaacaagataccagctcctccaacttaggcccgctcaaagagccagctggatagggtacgcaatcgcctaccacttactggaagactacgagatggccgctaagattcttgaggagttccgtaaaacacagcagacctcaccggacaaagtggactacgaatacagcgaactgctgctgtaccaaaaccaggtgctacgtgaagctggtctgtaccgagaggcccttgagcatctgtgcacttatgagaagcaaatctgcgacaagctagccgtggaggagaccaaaggcgaactcctgcttcagctatgccgcctcgaagatgcagctgacgtctatcgcggacttcaggagcggaatcccgaaaattgggcctattacaagggtcttgaaaaggccctgaagccagcaaatatgctggagcggctgaagatctacgaagaggcctggactaagtacccgcgaggcctggtgcctcggagattacccctgaactttctgagtggggagaagttcaaagagtgtctggacaagttcttacggatgaacttcagcaagggatgcccacccgtgtttaatacactaaggtccctgtacaaggacaaggagaaggtggccataatcgaagagctcgtagtcggctacgagacgtccctaaagtcttgtaggttgtttaaccccaatgatgacgggaaggaggaaccaccgacaaccctcctgtgggtgcaatactacctggcacagcactatgacaagattgggcagccctccatagctctggagtacattaacacagcaattgaatctactcctaccttaattgaactattcctggtcaaagcgaagatttataagcacgccggaaatataaaagaagctgccaggtggatggatgaagcgcaagccttggatacagccgaccgttttatcaactctaaatgcgcgaagtacatgttgaaggccaacctcatcaaagaggccgaagagatgtgctccaagtttactcgggaagggacctccgcggttgaaaacctaaatgaaatgcagtgcatgtggtttcagactgaatgcgctcaagcatacaaagctatgaataaattcggcgaggcgctgaaaaaatgccacgagatagaacgacatttcatagagattaccgacgatcaatttgattttcatacctactgcatgcgcaaaataacacttaggtcctatgtggacctcctgaagcttgaagacgtgctgcggcagcaccctttctactttaaagccgctagaattgccatcgagatctacctgaaactgcatgataatccattgacggatgaaaataaagagcacgaggctgacacagccaacatgtccgacaaggaactcaaaaaactgcggaacaagcagagacgggctcaaaagaaggcgcagatcgaggaggagaagaagaacgctgagaaagagaaacaacagaggaaccagaaaaagaagaaagatgatgatgacgaagaaatcggtggccctaaagaagagctgattccagaaaagctggccaaagtagagacacctctggaggaagctataaagtttcttactccactgaaaaatttggtgaaaaataagatcgaaacgcacctgtttgcgtttgagatctacttcaggaaggaaaagttccttctaatgctgcagtccgtgaaaagggcctttgcgatagattcctcccatccttggttgcatgagtgtatgataagactcttcaacaccgccgtgtgcgaatctaaggatctttcggacactgtgaggacagtccttaaacaggaaatgaacagactgtttggtgctacaaatcctaagaactttaacgaaacgtttctcaagaggaactccgacagcctgccccaccgcttgtccgctgctaaaatggtgtattatttggatccatctagccagaaaagggcaatagaactggcgacaacactggatgaaagcctcaccaatagaaacctgcaaacatgtatggaggtgctcgaggcgctgtacgatgggagcttgggcgactgcaaggaagcagccgagatctaccgtgcaaactgccataaactcttcccatatgcacttgcattcatgcctcctgggtatgaagaagacatgaaaatcactgtcaatggtgattcaagcgcagaggctgaagaattagccaatgaaatctag

SEQ ID NO: 31517 - DNA, 183 bp, synthetic construct
  source 1..183: mol_type = other DNA; note = Synthetic coding sequence
atgtcttgtacaattgaaaaggcgctggcggatgccaaggctctcgtcgaaagactgagggaccacgacgatgccgcagaaagccttatcgaacagaccaccgccctgaacaagcgggttgaagccatgaagcagtatcaagaagaaattcaggaactaaacgaagtagccagacatcgctag

SEQ ID NO: 31518 - DNA, 1419 bp, synthetic construct
  source 1..1419: mol_type = other DNA; note = Synthetic coding sequence
atgggtaaggaacaggaactgctagaggccgctagaactggccacctgcctgccgtggaaaaacttttaagcggaaagcggttaagtagtggcttcggcggaggaggaggcggtggtagtggcggtggaggcggaggcagcggtgggggaggcggaggcctgggatcttcctctcacccgctgtcaagtctacttagtatgtggcgcggaccgaatgttaattgcgttgatagcacgggatacacacctctgcaccacgctgccctgaacgggcacaaagatgtggtcgaggtgctgttgcggaacgacgctctgactaacgtggctgatagtaaagggtgttatccattacacttagctgcgtggaagggagatgcccaaatcgtccgtctactcattcaccagggcccttcccacacccgtgtcaacgaacaaaacaatgataacgagaccgctcttcactgcgcggctcaatacggccacaccgaagttgtgaaggttttgctggaagagttaaccgaccccactatgcggaataataagttcgagactccactggatttggcagcgctgtacggtagactggaggtcgtgaaaatgcttctgaacgcccatccaaatctcctgtcctgtaacaccaaaaaacacactcccctccacctggccgctcgtaacggacacaaagctgtggtgcaggtccttctggatgccggaatggacagcaactaccagaccgagatgggttccgccctccatgaggctgccttgttcgggaagactgatgtagtacaaatcttgctggcagccggtactgatgttaacatcaaagacaaccacgggctcacggcccttgataccgtccgagagctgcctagccagaaaagccagcagatcgccgctctgatcgaggaccatatgaccggcaagcggtctactaaggaagtcgacaagacacccccaccacaaccacccctcatatcctccatggattctatttcccagaaaagtcagggcgatgtcgagaaggcggtaacggagctgatcatcgattttgacgctaatgctgaggaagaggggccttatgaggcactttataacgccatcagctgccacagcttggacagcatggctagcgggagatcctctgatcaggactcaaccaacaaggaggccgaagctgccggagtcaaaccggcaggggtgcgtcctcgtgagagaccgccacccccagcaaaacctccacctgatgaggaggaggaagatcacatcgataaaaaatactttcccctgactgcatctgaggtcctcagcatgagaccaaggattcacgggtccgccgcacgcgaggaagacgaacacccctatgagctgctgctgacggcggagacgaaaaagaaaaagaagaagaaaaagaaatag

SEQ ID NO: 31519 - DNA, 1392 bp, synthetic construct
  source 1..1392: mol_type = other DNA; note = Synthetic coding sequence
atgtccggtgggactccttatatcgggtccaagatcagtctgatcagcaaggcggagattcgatatgagggcatactgtacacgattgacactgagaattcaaccgtggctctagctaaagtgcgctcattcggcacagaagatcggcctacagacagaccgatacccccacgcgacgaagtcttcgagtacatcattttccgaggatccgacattaaagacctgaccgtgtgtgaacccccaaagccacagtgctctctgcctcaggacccggctatcgtgcaaagttcactgggctcttcgacctcaagcttccagtctatggggtcatatggaccatttggccgaatgcccacctatagccagtttagcccatcctcactggtcggacagcagtttggtgctgtgggggtcgctggaagttcactgacctcctttgggacagaaacttcgaatagtggcacccttccacaatcatcagctgtaggctccgcttttacccaggacacacgctcactgaaaacccaactcagccagggtaggtcatcccctcagctggaccctctccggaaaagcccgacaatggaacaggctgtgcagaccgccagtgctcatcttcccgcaccagcggctgtcggtaggcgctcacccgtctcaactcgtccactcccctcagctagtcagaaggcgggtgagaatcaagaacatcgccgagcagaggtccacaaggtgtcacggcctgagaatgagcagttgcggaatgacaataaacgccaggtagccccaggtgccccatccgctccccgtagggggagaggcggtcacaggggtgggcgagggaggttcggcatccgccgtgatggtcctatgaaatttgaaaaggatttcgactttgagagcgctaatgcccaattcaataaagaagaaatcgatagggaattccacaataaactgaaactaaaagaggataagttagaaaagcaagaaaagccagtaaacggggaagacaagggagatagtggagtagacacccagaactccgagggcaatgcggacgaggaagatcccctcggccctaactgttactacgacaagaccaagagtttttttgacaatattagctgtgatgataacagagaacgaaggcccacttgggctgaagaacgcaggctgaatgcggaaactttcggcattccgctgcgccctaaccggggtcggggagggtatcgaggacgtggaggtctggggtttaggggtggcaggggcagagggggtgggaggggcggaacattcacagctcctcgaggattccggggaggattccgcggtggcaggggcggaagagagttcgcagactttgaatatcgcaaagacaacaaggtggcggcttag

SEQ ID NO: 31520 - DNA, 1287 bp, synthetic construct
  source 1..1287: mol_type = other DNA; note = Synthetic coding sequence
atgggcggaggcgttggggcttccagctcagggggtggcccaggcggtagcggcggtggcggaagtggtgggcctggagcaggaacctccttcccaccacccggagtaaaattgggccgtgattcaggcaaagtcacgaccgtcgtggcaacccttggccagggcccagagcgatcccaggaggtggcctacaccgatatcaaagtcatcgggaacggctcttttggcgtcgtgtatcaggctaggttagccgagacccgggagctcgtggcgatcaagaaggtattacaggacaagcggttcaaaaacagagagctgcagatcatgaggaagctcgaccactgtaacatcgtgcgcctgagatattttttttatagcagcggagaaaagaaggatgaactgtacctcaatctggtgctggaatatgtgcctgagaccgtgtacagggtagctcgacactttaccaaagctaaacttactattccaattctgtatgtgaaagtgtacatgtatcagttattcagaagcctcgcttatatccacagtcagggagtgtgtcaccgcgatattaaacctcagaaccttctggtcgacccggacaccgcagtgctgaaactttgcgacttcgggtcagctaagcaactggtgaggggcgagcccaatgtcagctatatttgctctaggtactacagggccccagagctaatttttggagccaccgattacacttctagcatagacgtgtggtctgcaggatgcgtgctcgctgagctgctgttgggacaacccatctttcccggtgacagtggagtggaccaactcgtggagataatcaaagtgttagggactccaacaagagagcagatccgtgaaatgaaccccaactataccgaattcaagttcccgcagattaaggcccatccctggaccaaggtatttaaaagcagaacccccccagaggctatcgccttgtgctccagtctgctggagtacacccctagtagtcgcctgtcaccgctagaggcctgtgcacacagcttcttcgacgagctgcggtgcctcgggacccaactacctaataatcgcccattacccccactgttcaacttctcagccggtgaactgagtattcagccatccctcaacgcgatcctgattcccccacacctcagaagtccagcaggaacaactactttgacaccgagctctcaggcactgaccgaaactccaacctctagtgactggcagtctacagacgccactcctaccttgacaaattcttcctag

SEQ ID NO: 31521 - DNA, 657 bp, synthetic construct
  source 1..657: mol_type = other DNA; note = Synthetic coding sequence
atggacgcagagcaccccgaactgaggtcatacgcccagtcacagggatggtggactggcgagggggagttcaattttagcgaggtgttctcccccgtcgaagaccatctggactgtggcgctggcaaagacagcctggaaaagcaggaggagagtatcactgtgcagactatgatgaacacactgagagataaagcatccggcgtgtgcattgatagtgaattcttccttacaaccgcatccggtgttagtgtgctgcctcagaaccgaagctccccttgtattcattacttcacaggaacgccagatccttcaagatccatttttaaaccctttatctttgtggacgacgttaagttggtcccgaaaactcaaagcccctgctttggagacgatgatccagcgaaaaaagagcctcggtttcaagagaaaccagaccgtcgccacgagctgtacaaggcccatgagtgggccagggccataatagaaagcgatcaggagcaaggaagaaaattacgaagcaccatgcttgaactggagaagcagggtcttgaagcaatggaagagatcctgacttcgagcgaaccgctcgaccctgccgaggtgggcgacctattctacgactgtgtggacactgagattaagttcttcaagtag

SEQ ID NO: 31522 - DNA, 573 bp, synthetic construct
  source 1..573: mol_type = other DNA; note = Synthetic coding sequence
atggccttactggcggaacatctgttgaaacccctgccagccgacaaacaaattgaaactggcccattcttggaggcagttagtcacttaccaccttttttcgactgcctggggagccctgtgttcactccaattaaggctgacatttccggcaacatcacaaagatcaaagctgtatatgataccaaccccgctaaattccgtacgctccagaatattcttgaagtcgaaaaggaaataggactaaggttcatccaagtgttcttacagtcgatttgcgacggcgagagggacgaaaatcaccccaatttgattagggtcaacgccacgaaagcgtacgaaatggccctgaagaaatatcatggctggatcgtacaaaaaattttccaggccgcattatatgcagccccttacaaatccgatttcttgaaggctctgtctaaaggccagaatgtgacagaggaggagtgcctggaaaagatacggctctttttggtgaactacaccgcaactattgacgtgatctatgaaatgtatactcagatgaatgccgaactgaattacaaagtatag

SEQ ID NO: 31523 - DNA, 762 bp, synthetic construct
  source 1..762: mol_type = other DNA; note = Synthetic coding sequence
atgtcgatttgttcttcactggctaggaagttcccgaaattgaccatcattggagaagaagaccttccatctgaggaagtcgaccaagagctcatagaagattctcagtgggaggagattctcaagcagccttgtcccagccagtatagtgcaatcaaagaggaggatctggtggtatgggtggacccactggatgggactaaggaatatactgagggtcttttggataacgtcactgtgctaatcgggattgcctatgagggaaaggcaatcgccggtgtgatcaatcagccgtattacaactacgaggccggacccgacgccgtgttaggcagaactatctggggcgtactgggcctgggcgcttttggcttccagttgaaggaggtccctgcaggtaagcacattatcaccacaacacgctcccactccaacaaactcgttactgactgcgtcgcggctatgaacccagatgctgttctgagggttggtggtgccggtaacaagattatccagctgatcgaaggaaaagcgtccgcttatgtattcgcctcccctggttgcaaaaagtgggacacctgtgcacctgaagtgatcctccacgctgtcggcggaaaactgaccgacattcatggtaatgtgctgcagtatcacaaggatgtcaagcatatgaattccgcaggagtgttggctacgctccgcaattatgactattatgcttcccgcgttcccgagtctataaagaacgctcttgtcccgtag

SEQ ID NO: 31524 - DNA, 1590 bp, synthetic construct
  source 1..1590: mol_type = other DNA; note = Synthetic coding sequence
atgggagcctatcttagtcagcccaacaccgtgaagtgttcaggcgacggagtgggggtgagtatggaggatgcccataactgcatcccggagctggattctgagaccgcaatgttctccgtgtacgacggccatggcggagaggaggtggctctgtactgtgccaagtacttgcctgacattatcaaggatcaaaaagcttacaaagaaggcaagctgcaaaaagccctagaagacgcttttctggccatcgatgccaagcttaccaccgaggaagtaatcaaagagctggctcagatcgctggtcggccaaccgaagacgaggacgaaaaagagaaagttgccgacgaagacgacgttgacaacgaagaagcagctctcctgcatgaagaggcgacaatgacaatcgaagagttgctcactaggtatggacagaattgtcataaagggcctccacattcaaagagcggcggtggcacaggtgaggaaccaggatcacagggtctcaatggagaggccggacctgaggactcaacgcgggaaactccatctcaggaaaacggtccgactgctaaagcatataccggcttctcaagcaattctgaaagaggcacagaagccggacaggttggtgagcctggtatacctaccggcgaagcgggaccctcatgtagctctgcctccgataagcttccacgcgtggcaaagtcaaagtttttcgaggacagcgaggatgaatcagatgaggcggaggaggaagaggaggattcggaggagtgttcagaggaggaggatgggtacagctcggaggaggccgaaaacgaggaggatgaagacgacacagaggaggccgaagaggatgacgaagaagaagaagaggagatgatggtcccagggatggaaggcaaggaagaaccaggcagtgatagtggtacaaccgctgtggtggccctgatccgaggaaagcagctgatcgtggcaaacgcaggagatagcaggtgtgttgtatccgaggccggtaaggctcttgacatgtcttatgatcacaagccggaggacgaggtcgagctggcccgaataaaaaatgcgggtggcaaagtcactatggacgggagggtgaatggcggactaaaccttagccgcgcaatcggtgatcatttctataaaaggaacaagaacttgccccctgaagagcagatgatctcagctttaccagacatcaaagtgctgactctgacagatgaccatgaattcatggtgattgcttgcgacggcatctggaacgtcatgtccagccaggaagtggtcgacttcatccagtcgaagatcagccaacgcgatgagaacggcgaattaaggctactctcctccattgtcgaagaactgttagaccagtgtctggcgcctgatacctcaggggacggcactgggtgtgataacatgacctgcattatcatctgcttcaaacccaggaacaccgcggagctgcagcctgagtctgggaagagaaagctagaagaagttctttccaccgaaggcgctgaggaaaatggcaattccgataagaagaagaaggcaaaacgagactag

SEQ ID NO: 31525 - DNA, 1293 bp, synthetic construct
  source 1..1293: mol_type = other DNA; note = Synthetic coding sequence
atgaccttcgagctctatgatgagtggattcaggcgagtaacgttcaagagcaggataagaagctgcaggctctctggaacgcatgcgaaaaacttccaaaggccaatcataacaacatcagatacttgattaagtttctgtctaagctctccgagtaccaagatgttaataaaatgactccctccaacatggccatcgtcctggggcctaacctactgtggccccaagccgaaggaaatatcaccgagatgatgacaactgtaagcctgcagattgtaggcatcatcgagcctatcatccagcatgctgactggttttttcccggtgagatcgagttcaacataaccgggaattatgggtcgcccgtacacgtgaatcataacgccaactattcaagcatgccatcaccagatatggatcccgctgatcggcgtcaaccggagcaggccaggcgtcccctgtccgtggcaacggacaacatgatgctggagttctataaaaaggatggtatgggggtgcgtgtaatggatactaactgggttgcaagaagaggtagtagcgccggtcgcaaggtgagttgcgccccaccatccatgcagcctcccgcaccacccgcagaactggctgcacctctcccctctccactgccggagcaacccctcgatagcccggcagccccagctctgagtccttcaggcctcgggcttcaaccagggccagaacgaacttccaccacaaagagtaaagagctgtcccctggttccgcacagaaaggatcacctggcagttcccagggcacggcatgcgctggtacacagcctggcgctcagcccggagcacagccaggcgcatctccctcaccatcacaaccccctgcagatcagtctcctcacacactccggaaagtgtccaagaagcttgccccaataccaccaaaggtaccattcgggcagcccggtgctatggccgaccaaagtgccggacagccaagccccgtaagtctgtctccaacaccaccatccaccccctcgccttatggtttatcatacccccagggatacagtcttgccagtgggcagctcagtcccgctgctgcaccacctctggccagcccaagcgtgttcacctccacactctctaaatccagaccgactcccaagccacgacaacggcctacactgccacctccacagcctcccacagtgaatttgtccgcctccagtccccaatcaaccgaggcaccgatgctagacggcatgtctcccggtgagtctatgtctacagcggtctag

SEQ ID NO: 31526 - DNA, 846 bp, synthetic construct
  source 1..846: mol_type = other DNA; note = Synthetic coding sequence
atgcccggaccccgacggctcaggtcacccggtgggagcggatgttcttcccggggatcaggacctcgattaagtactcgcaggtggcgcccatgctgctactgtggcggatctggcgtttggcttctgcggaccccaccatcccccagcgcctggcctgcgaggcggtgccccaggcacagattcgaattctgcgagccagcatttgtagtgggcaactgtcttcagattgccagcgacagtcaccagtacgacagaatatactgtggtgctggcgtgcagaaagaccacgaaaattacatgaagattctcctgaaagtcgggggtatcttggttatgcccatcgaagaccagttaacgcagattatgcgcactggtcagaacacctgggagtctaaaaacatcctggccgtttcgttcgctcccctcgttcagcccagtaaaaatgataacggaaaacctgacagcgtcggacttcccccttgtgcagtaaggaacctgcaagatttggctcggatctatattcgacggacactgaggaactttatcaacgatgagatgcaagctaaaggaataccacagagagccccaccaaaacgaaaaagaaaaagggtcaaacagcgaatcaacacgtatgtgttcgttgggaatcagttaatcccacagcctctggattctgaggaagacgagaagatggaggaggacaacaaagaggaggaggagaaggaccacaatgaagcgatgaagcccgaggagcctccgcagaatctcctcagggagaaaatcatgaaactgcccttacccgaaagtcttaaggcctaccttacatatttcagggacaagtag

SEQ ID NO: 31527 - DNA, 1251 bp, synthetic construct
  source 1..1251: mol_type = other DNA; note = Synthetic coding sequence
atgtctcccgctatgttgtccgtgttggtgaaaatgatgctggcccaagctcaggagtccgtattcgagaagattagccttcccggtatcaggaacgaattctttatgctggtcaaagtggctcaggaggctgctaaggtgggcgaggtttatcagcagctccatgccgctatgtcccaggcacctgtgaaggagaacataccttatagttgggcttccctggcttgcgttaaggcacatcactacgctgccctcgcgcattacttcactgctatactgctaatcgaccatcaggtgaagccaggaaccgaccttgatcatcaagagaagtgtctgtcgcagctgtacgatcacatgccagagggcctgacccccttagccaccttaaagaatgatcagcagagacgccagctgggaaagagccacctgcgtagagccatggcccaccacgaggagtctgtacgggaggctagcctctgtaaaaagttacggtcaatagaagtactgcagaaggtcctgtgcgctgctcaggagagatccaggctgacgtatgcccaacatcaggaggaagacgatttactaaatctgatcgatgcccctagcgtcgtggctaaaacagagcaggaggtggacatcatcctcccccaattctcgaaattgactgtcaccgatttcttccagaagctaggaccactgtctgtgttctctgctaataagaggtggacaccacctaggagcattagattcacagcagaggagggagacctgggatttaccttacggggtaacgcgcctgtgcaggtccactttctagatccatactgtagtgcttctgtcgccggtgcaagagaaggggattatatcgtttctatccagctggtagactgcaaatggctcaccctgtctgaagtgatgaaactgctgaagtccttcggtgaggacgaaattgagatgaaagtggttagtctccttgacagcacaagttccatgcataataaatccgctacttactccgtgggtatgcagaagacctattcaatgatttgccttgcaatcgatgatgatgacaaaacagataagaccaaaaaaatcagcaagaagctatcctttttgtcttggggcaccaataaaaaccggcaaaagtccgcaagcactctgtgcctgcccagtgtgggggcagcaagacctcaagttaagaaaaagttgccctctccatttagtctccttaattcggactcaagctggtactag

SEQ ID NO: 31528 - DNA, 6200 bp, synthetic construct
  source 1..6200: mol_type = other DNA; note = Synthetic coding sequence
atgtgctcaacaccaggaatgcccgcaccaggagcatcattagccctgcgtgtgagtttcgtagatgtgcatcccgacgtaattcccgtgcagctgtggggactggtgggcgagcgcaggggagagtatctgcggctgtcgagagagatccaggaggccgcagccacaagggggcagtgggctctggggtccgcttccgcaagccctggggagctgtgcctggtacaggtgggactgctatggcacaggtgcagagtagtctcccggcaggcccaggaaagcagagttttcctcctcgatgaggggcgtaccataaccgccggagccggaagcctagctccaggccgaagagaattcttcaatctgccctccgaagtcctgggctgtgtgctggcgggactggtgcccgcaggctgcggtgctggctcaggagaacccccacaacactggcccgcagatgcggttgacttcctctccaatctacagggcaaggaggtgcatggatgtgtcctcgatgtgttgttgttacacaggctggtcttgctggaagtccctgatgtttttcagcagatgcgcgagctcggcctggctcggagagtcccagactccttgtttagaagcctgttggagcgctatctgaccgcagcgacagcgtccgtcggctctggtgttcccgtgctaagcagagtcccactaaagcagaaacagccaggcctggactacttttacccacagctgcagcttggcgtcaccgaagcagtagtgataacacaggtttgtcacccccatagaattcactgtcagctcagatctgtctcgcaggaaatccataggctcagcgagtctatggcacaggtctatcgaggtagtacgggcaccggggacgagaacagcacctcagcaacatgggaagagagggaggagagtcctgataagcccggttctccttgtgctagttgtggcctcgacgggcactggtatagagcactgcttttggagacctttagaccccagagatgtgctcaggtgctgcacgtcgattacggcaggaaagagctggttagttgcagctccctgagatatctgctgcccgagtacttccgtatgccagttgtcacctacccttgcgccttatacgggttatgggacggcggacgcggatggagccgtagccaggttggcgatctcaagaccctcatcctgggcaaggccgtgaacgccaagatcgagttctactgcagctttgaacatgtatattatgttagcctttacggtgaagatgggattaacctaaatcgcgtgtttggtgtgcagtcctgctgcctcgctgatagggtgctgcaatctcaggcgacagaagaagaggagcctgaaacttcccagagccaatcacccgcagaggaggtggatgaagaaatttccttacctgctctgagatccattcgcctgaagatgaacgctttctacgatgcacaagtggagtttgtcaagaaccccagtgagttttggatacgacttaggaagcacaatgttacgttctccaaattaatgaggcgaatgtgtggcttctattctagtgcttccaaacttgatggggtggtcctgaagcctgagcctgatgacctgtgctgcgttaaatggaaggaaaacggatattacagagcaatcgttaccaaattggacgataagtcagtggacgtgttcctcgtcgatcgcggtaacagcgagaatgtcgattggtacgacgtccgcatgttgctcccacagtttaggcagctgcccatcttggctgtaaaatgtacactggctgacatatggccgttaggcaagacttggtcccaggaggccgtgtcattttttaagaaaaccgtccttcataaggaacttgttatccacattctcgacaagcaggatcatcagtatgtcatcgagattctggatgagagcaggactggcgaggaaaacatttctaaagtgattgcacaagctgggtatgcaaagtatcaagagttcgagactaaagaaaacatactggtcaacgcccactccccagggcacgtcagcaaccacttcacgactgagagcaataagatcccattcgcgaaaactggggagggagaacagaaagctaagagagaaaataaaactacatctgtgtctaaagccctgagcgatacaacagttgttaccaatgggtcgaccgagttggttgtgcaggaaaaagttaaacgggcatctgtatatttcccattaatgcaaaattgtttagaaataaagcctggctcgtcttcaaaaggagagttagaagtgggcagcacagtggaggtgcgcgtctcatatgttgagaaccccggttacttctggtgtcagctgacccgaaacatacaggggcttaaaacactcatgagtgatatccaatactactgcaagaacaccgctgcccctcaccagcggaataccctcgcctgtctggccaagaggacagtgaaccgtcagtggtcccgcgctctaatctccggcatccagtccgtagagcatgtcaatgtgacgtttgtggattatggcgaccgcgaaatggtttcggtgaaaaatatctattctatcagcgaggaatttttgaaagtgaaggcacaggcattccgatgcagtctttacaatctcattcagccagtcggccagaatccttttgtgtgggacgtgaaagcaattcaggctttcaatgagtttatcgataacgcctggcagaagaacctcgagctcaagtgtacaatattcgctctggctagtatcaatgaagagctgttcaatatcgtggacctgctgacccctttccagtcagcatgtcactttctcgtagagaagcggttggctaggcctgtgaagctccagaaaccactggagagttccgtccagctgcacagttacttctatagcacccacgatatgaagatcggctcagaggaactggtttatattacacacatcgacgatccctggaccttctattgtcagctggctaggaacgccaatatcctcgagcagctatcctgcagcattacccagttaagtaaggtgctgctgaaccttaagacatcacccctgaacccaggcaccctctgccttgctaagtacacggacggtaactggtatcgaggtattgtcatcgagaaggaaccgaaaaaagtgttcttcgtcgactttgggaatatttacgttgtgaccagcgatgacctgttacccatcccttcggatgcctatgacgttctcctgctgccaatgcaggctgtccgctgttccctatctgacatcccagatcatatccccgaagaagttgtggtgtggtttcaagaaacgatactggacaaatcactgaaggccctggtcgtggcaaaggaccccgatggcacactcatcattgaattgtacggggataacatccagatctccgccagcatcaataaaaagttgggcctcctgtcctacaaggacaggattcggaaaaaggagtccgaggtcctgtgctcaaccacagagacactcgaggagaaaaacgaaaacatgaagctgccctgcaccgagtatctgtccaagtccgtcgggtataagttacctaacaaggaaattctcgaggaaagctacaagccccagatcaacagcagctataaggagctgaaattactgcagtctctcactaagaccaatctggtgacccagtatcaggactctgtcggcaacaaaaactctcaggtgttccctttaaccacggagaagaaagaagagatctctgcagaaacaccacttaaaaccgctcgagtcgaggccacactgtccgagaggaagatcggtgacagctgtgacaaggacttgcctctgaagttctgcgaattccctcaaaagacaatcatgcctggatttaaaaccaccgtgtacgtgagtcacatcaatgatctttcagacttctacgtacaactgattgaggatgaagcggagatcagccacctcagtgagagattgaatagcgtgaaaacccgtcccgagtattatgtgggaccgccactccagcgcggtgatatgatatgcgctgttttcccagaagacaacctctggtaccgcgcagtcatcaaagagcagcagccaaacgatctactatcagtccaattcattgattatggaaacgtgagtgtcgtgcataccaataaaattggcaggctggatctggtaaatgcaatcctccctggactttgcatccactgctcgctgcagggctttgaggtgccagacaacaagaactcaaagaagatgatgcactattttagccagcgcacaagtgaagctgccatccggtgtgagttcgtgaaattccaggatcgctgggaggtaatattggccgatgaacacggaataattgccgacgatatgatctcccgctacgcgctgtccgaaaaaagccaagtggaattaagcactcaggtcattaaaagtgcctcgagcaagtcagttaacaaatccgacatagacacgtccgtgttcctgaattggtacaaccccgagaagaaaatgatacgggcatatgccactgtgatagatggacccgagtacttctggtgtcagtttgcagacacggagaaactgcaatgcctggaagtggaggtgcaaactgccggtgagcaggtggccgaccgacggaattgtattccttgcccgtatatcggtgacccatgcattgttagatatagagaggacggccattactatcgagctctcataaccaatatatgtgaggactatctggtctctgtgagactggtcgactttgggaatattgaggattgtgtagacccaaaggctctgtgggccatcccgagtgaactgctctcggtcccaatgcaggcatttccttgttgtctatctggattcaatataagtgaaggtttgtgttctcaggaggggaacgactacttttacgagataatcactgaagacgtgctggaaatcaccattctcgagatcagacgggatgtgtgcgatattccattagccattgtggaccttaagagcaagggaaaatctatcaacgagaaaatggagaaatactctaagacaggtattaaatcagccttgccatacgagaacattgattcagagatcaaacagactctgggcagttataatcttgacgtgggcctgaaaaaactttctaataaggccgttcagaataaaatctacatggagcaacaaacagatgaactggctgagattactgaaaaggatgtgaatataatcggtactaaaccctccaattttagagacccgaaaacagacaatatttgcgaaggcttcgaaaatccgtgcaaagataagatcgacaccgaggaactagaaggcgaactggagtgtcacctggtggacaaagccgagttcgacgacaaatatctgattactggattcaacaccctgttgccccacgcaaatgagacaaaagagatcctggagctgaactcattggaggtgccactgagcccagacgacgagtctaaagaatttctagaactggagtctatcgaactccaaaactctctggtggtggatgaggaaaaaggtgagttgtctcccgtacccccaaatgtgcccctatcgcaagagtgtgtaacgaaaggcgcaatggagttgttcaccttgcagctccccctgagttgtgaagccgagaaacagccggagctggaactgccaactgctcagctcccattagacgataagatggaccccctctcattgggagtgtctcagaaagcccaggaaagcatgtgcactgaggacatgcgaaagtcgtcctgcgtggagtctttcgatgaccaacggagaatgagtttgcacctgcacggcgcagactgcgaccctaagacacaaaacgaaatgaacatctgtgaggaggagttcgtcgaatataagaaccgggatgccatctccgctttaatgcccctatttagcgaagaagaaagttcagacggctccaaacataacaacggactgcctgatcacataagcgcccagctccagaatacctatacactgaaagcctttacagtgggtagcaaatgcgtggtctggtccagtctcagaaatacatggtctaagtgtgagatcctggaaacagccgaggagggaactcggaaacgtggcctggaggtcatggagattta

SEQ ID NO: 31529 - DNA, 264 bp, synthetic construct
  source 1..264: mol_type = other DNA; note = Synthetic coding sequence
atgtcatcatgtgtctcatctcaaccgtctagcaatcgcgcagcaccacaggatgagctcggtggacgcggaagttcttccagcgaatcccagaagccttgcgaggccctccgtggattaagttctttaagtatccacctcggaatggagtcctttattgtcgtgacagagtgtgagcccggttgtgctgtggacttgggtctggcacgtgaccgccctctcgaagccgacggacaagaagtgcccctcgatacaagcggttag

SEQ ID NO: 31530 - DNA, 2469 bp, synthetic construct
  source 1..2469: mol_type = other DNA; note = Synthetic coding sequence
atggccgcagaaggggaccccgagtggggccctacacctccaagtacatctgcaactacggcggcacgccgagctgtcaacaaggtggtttacgatgatcatgaaagcgaggaggaggaggaggaggaggatatggtcagcgaagaggaagaggaagaggacggcgacgctgaggagacacaggacagcgaggacgacgaggaggacgaaatggaggaggatgatgacgatagcgactaccctgaggagatggaagacgacgacgacgatgcctcatattgcaccgagtcaagcttccggtctcattccacctactcctcaacacctgggaggagaaaaccgagggttcacaggccccgtagcccaattctagaggaaaaggacatccctccactagagttccccaagtcctcagaggacctgatggtcccgaatgagcacattatgaacgtcatcgctatctacgaagtgctgcgcaatttcggaaccgtactgaggttaagcccgttcagattcgaggacttttgtgctgccctggtgagccaagaacagtgtaccctgatggctgaaatgcatgtggtgttgctgaaagctgtactgcgtgaggaggacacctccaataccactttcggtcctgccgacttgaaggacagtgtgaatagtacactatactttatcgatgggatgacttggcctgaagtgctcagagtctattgcgagtctgataaggaatatcatcacgtgctgccataccaagaagcagaagactacccctatggtcccgtcgagaacaaaattaaggtgcttcagttcctagtagaccagttcttgactactaatattgcccgagaggagctcatgtcagagggcgtgattcagtacgacgatcattgtagagtgtgccacaagctaggagatttactgtgttgtgagacttgctctgcggtctaccatctcgagtgtgttaaacctcccctggaagaggtgcccgaggacgagtggcaatgtgaggtttgtgttgcacacaaggtccccggagtcacggactgcgtggcagagatacagaaaaataagccatatatcaggcatgaaccgattggatacgatagaagtaggagaaaatactggttcctcaataggcgactgattatcgaggaagatacagagaacgaaaacgaaaaaaaaatatggtactacagcactaaagtgcagttggccgaactcattgattgcctcgataaagattattgggaagctgagctttgtaagatcctggaagagatgcgagaagagatccatcggcacatggatattactgaagatttgaccaacaaagccagaggcagcaataagtcttttctcgccgcagcgaacgaggaaatcctggaatctatcagagcaaagaaaggagacatcgacaatgttaaaagccccgaggagaccgaaaaagataagaatgaaactgagaatgattcgaaggacgccgagaagaacagggaggagtttgaagaccaatcactcgagaaagattcagatgataaaaccccagatgacgaccctgaacagggcaagagtgaagagcccactgaggtgggcgacaaaggtaattcggtttcagcaaatctaggcgacaacaccaccaacgcaacttccgaggagacctctccgagcgaaggcagaagccccgttggctgcttatccgagacccccgattcttctaacatggcagaaaagaaagttgcttccgagctgcctcaggacgtccccgaagaacccaataaaacctgtgagtcttccaatacatctgctaccaccacaagcatccagccaaatttagagaatagcaattcaagttccgagttaaactcttcacagtctgaatctgctaaggccgcagatgaccccgagaacggtgaacgagagagccatactccggtatcaatccaagaggagattgtgggcgacttcaagtctgagaagtctaacggggaactttctgagagtccaggagctggcaaaggcgcttctggtagtaccaggatcataacccgtctccgaaaccctgactccaaactgagccagctcaagtcccaacaggttgctgccgctgcacacgaggctaacaaactgttcaaagaaggtaaggaagtgcttgttgtgaatagtcagggggaaatcagtaggctttcaaccaagaaggaggtgattatgaagggaaatataaacaactacttcaagctcggacaggaggggaaatatcgtgtctaccataaccagtattccaccaactcattcgctctcaataagcatcagcatagagaggatcatgataagcgacgccatctggcccataagttctgcttgacgccagcaggggaattcaaatggaacggttccgtgcacggatcaaaggtgttgaccataagcactttaaggctcaccattacccagtatggcgagaacttatag

SEQ ID NO: 31531 - DNA, 552 bp, synthetic construct
  source 1..552: mol_type = other DNA; note = Synthetic coding sequence
atgttgcagcaaacttggacatccaggtgtcttatgaaattctatgctgtcgtagccactagccccgcttcctgggagtctcacaagatcgccgaacggatcgaacagcggattcttaatagtaaccctgtgatggaggccttcggcaacgcctgtacactgcgcaataataattcctccagattcggaaagtttatccagctgcagctaaacagggcccagcagatgactggggcagcagtccagacctacctgctcgagaagacccgcgtggcctgtcaggcaagctccgaaagaaatttccacatcttttaccaaatatgtaaaggggctagcgaggacgagcgcctgcagtggcacctgcccgagggcgctgctttcagctggctgcccaacccagaacgatctcttgaagaggactgtttcgaagtgaccagagaggctatgcttcacctgggcatcgacacacccacacaaaacaatatctttaaagtaaggagaaaggctacccccctgaagtttgggcgagatgacgggcagccttttgcctag

SEQ ID NO: 31532 - DNA, 744 bp, synthetic construct
  source 1..744: mol_type = other DNA; note = Synthetic coding sequence
atgcttaaatttctggtctggttcctgcaatggtgcgtgtgtgtactggttcagcccgctaaagagctactgcactgcctgaaaatgcagatgagaatttccaagtacaccaagtgtctccaagcacagattgcgatcaccgtgcctaaaacctggaaaaaacctaaggatcggactcggaccaccgaagaaatgcttgaggccgaactggaactcaaggcagaggaagagctcagtattgataaagtactggaatcagaacaggataaaatgtcccagggttttcaccccgaacgtgatccaagcgatctgaagaaggtaaaggccgtcgaggagaacggagaagaggccgaacctgttcgaaatggggctgaaagtgtatctgagggggaaggcatcgacgccaattcaggtagcaccgactcatcaggggatggcgtaacgtttccattcaaacccgaaagttggaaaccaacagacacagaggggaagaagcagtacgacagagaattcctgctggatttccagtttatgccagcgtgtatccagaaacctgagggcctcccaccaatctcagatgtggtgctggataagattaaccagcccaaactgccaatgcgcacacttgatcctcggattttaccccgaggtcccgatttcactccagcctttgccgattttggcagacagacgcccggtgggaggggagtgccagtctctgcctcatctctgcaacttacgtag

SEQ ID NO: 31533 - DNA, 981 bp, synthetic construct
  source 1..981: mol_type = other DNA; note = Synthetic coding sequence
atgctcggaggcgtgggcgaggaaaatgaaaaactctggagttttacgaagaaggcttcccacatccagctcgactcccttcccgaggtcccactgctggtcgacgttccctgcttgtcagcacagcttgatgactctatactgaacattgtgaaagaccacatcttcaaacacgggacagtcgcctcaagaccccctgtacagatagaagagctcatagaaaaacctgggggtatcatcgtgcgatggtgtaaggtggacgatgattttactgcccaggactatcggcttcagtttcgaaaatgtactagcaaccacttcgaggatgtctatgtcggatctgaaacagagttcattgtcctacacatcgaccctaatgtagattaccaatttagggtttgtgcgaggggcgacgggcgacaggaatggagtccctggtcagttcctcaaattggccattccaccctcgttccccacgagtggaccgctgggttcgagggctattccctgtcgagtcgtcgtaacattgctttgaggaatgatagtgagtcaagcggtgtgctgtattcccgagcccctacttacttctgtggacagacacttactttccgggtggagactgtcggccaacccgatagacgggatagtatcggggtatgcgccgaaaagcaggacggttacgattccctgcagagagatcaggcagtatgtatctccacgaatggcgctgtattcgtgaacgggaaggaaatgactaaccagctgcccgcagtgacaagtgggtctaccgtaacttttgacatcgaggctgtcacgctagggaccacttctaacaacgagggcggacactttaaactgcgggtgaccatttctagcaataatcgcgaagtcgtgttcgactggctgctcgaccaatcctgcggctccctctatttcggctgcagttttttttatcctgggtggaaagtgcttgtcttttag

SEQ ID NO: 31534 - DNA, 2436 bp, synthetic construct
  source 1..2436: mol_type = other DNA; note = Synthetic coding sequence
atggtatcagaggaagaggaggaggaggacggagacgcagaggagacgcaagactctgaggacgacgaagaagatgaaatggaggaagacgacgatgacagcgactacccagaagaaatggaggacgacgacgatgacgctagctattgcaccgagtcgtcattccgctcgcacagcacatactccagtactcccggacggcgtaaacctagggtccataggccacgaagccccattttagaagagaaggacatcccacccctggagttccccaaatcaagcgaagatctgatggtacctaatgagcatatcatgaacgtcatcgccatctacgaagtattgaggaatttcgggaccgtgctgcgattgagcccattcagatttgaggatttctgcgccgctctagtgagtcaggagcagtgcaccctaatggccgaaatgcacgtggtcctgctcaaggcagttcttcgcgaggaggacacttctaacacaacgtttgggccagccgacctaaaggactccgtgaacagcacgctgtacttcattgacggtatgacgtggcctgaagtgcttcgcgtgtactgtgagtctgataaggagtaccatcacgtcctaccataccaggaggcggaggattacccttacggccctgttgagaacaagattaaagtactgcaatttcttgtagatcagttccttaccacgaatattgcccgagaggagcttatgtccgagggcgtgatacagtatgacgatcattgtcgcgtctgccataagttgggcgatttgttatgttgtgagacttgcagtgcagtgtaccatttagagtgcgtgaaaccccctttggaggaagtccctgaagatgaatggcaatgcgaggtttgcgtggcacacaaagttcctggcgtgactgattgtgtggctgagatccagaaaaataagccatatatacgccacgagcccattggatacgacagatctcgtaggaagtactggtttctgaaccgccgacttataattgaagaagacacggagaatgaaaacgaaaaaaagatatggtactatagcactaaggtgcagttagcagagcttattgattgtctcgacaaagactactgggaagctgaactttgcaaaattctggaagagatgcgagaggagatacatagacacatggacatcactgaggatctgactaataaagcaagagggtccaataagagcttccttgccgcagccaacgaagagatcctcgaatcaatacgagcaaagaaaggagatattgataatgtcaagtcacccgaggagaccgagaaggataagaatgaaactgaaaacgacagcaaagacgccgagaagaatagggaagaattcgaggatcagtcactcgagaaagatagcgatgacaaaactcctgacgacgaccccgagcaggggaagtcagaggagcccactgaggtcggggataaaggcaactccgtttctgccaatctgggcgataacaccaccaatgccacatcagaagagactagtccgtccgagggcagaagccctgtcggctgcctttctgagacacccgattctagtaacatggccgaaaaaaaagtggccagcgaactgccacaggatgtgccagttggagacttcaagagtgagaaatccaacggagagctctccgaaagcccaggggcaggcaagggagcatctggttccaccaggataatcactcgcctgcgcaacccagacagcaagctaagccaactgaagagccagcaagtggcggctgccgcacatgaggccaacaagttgttcaaagagggcaaagaagtgctggtcgtgaactcccagggggaaatttctcggctgtccacaaaaaaagaggtgataatgaaaggtaacataaataattattttaaacttggccaagaaggcaagtatagggtgtatcataaccagtactctaccaactcttttgccctgaacaagcatcagcaccgcgaggaccacgacaagcggaggcaccttgctcacaaattctgcttgacccctgctggcgaatttaagtggaacgggtccgttcatggatctaaagtgctcaccattagcactctccgcttgacgatcacacagctagagaataacattccctcctctttcctgcatccaaattgggcctctcaccgggctaattggatcaaagcagtgcaaatgtgcagcaaaccccgagagttcgctcttgcccttgctattctggaatgcgctgtcaagccagtagtcatgttgccaatttggagagagagccttggccacaccagattacaccgtatgacgagcatcgagcgagaggaaaaggaaaaagtgaaaaagagggaagagacagggagaaggcgtaatgacgccgcatccgatatgggtaagatccatatttctagttag

SEQ ID NO: 31535 - DNA, 1752 bp, synthetic construct
  source 1..1752: mol_type = other DNA; note = Synthetic coding sequence
atggcccctgaactgacacccgaggaagagcaagcaacaaagcaattcctggaggagattaataagtggacggttcagtacaacgtgagcccactcagctggaatgtcgcggttaaattcttgatggctaggaaattcgatgtgctgcgggcaattgaactgttccactcctaccgagagacgcggaggaaggagggcattgtaaaactgaaaccccacgaggagccactcaggagtgagattttgtcaggtaaatttacgatactgaatgtgagagacccaaccggagcctcgatcgccttgtttactgccagactccatcaccctcataagagtgtgcagcatgttgtcctccaggccctgttttacctgctcgaccgggcagttgactctttcgaaacacaaaggaatgggttggtgtttatttacgacatgtgtggatccaattacgctaatttcgagctggatttgggtaagaaagtgctcaacctccttaagggagccttccccgctcgactaaaaaaggtcctcatagtgggggctcctatctggtttcgggtgccctacagcattatatccctgctgttaaaagacaaggtgcgcgaacgaatccaaatcctcaaaacctcggaggtgacacagcatttaccaagagagtgcttaccagaaaatctgggcggatacgtaaaaatcgatctggccacatggaattttcaatttcttccccaagttaacggccatcccgatcccttcgacgagatcattcttttttctctgccccctgcccttgactgggattctgtccacgtcccgggacctcatgcgatgactatccaggagctcgttgactatgtcaacgcgaggcagaagcaagggatctatgaggagtatgaagatattcgcagagaaaaccctgtgggaacatttcactgctccatgtcccccggtaatcttgaaaaaaatcgctatggcgacgttccatgcttagaccaaacccgagtaaagctgactaagcgctctgggcacacacagacagattatataaacgcatcctttatggacggctacaaacagaagaatgcttacatcgggactcagggccctcttgagaacacatatagagacttctggcttatggtttgggagcaaaaggtgctggtcatcgtaatgactacacgctttgaggagggcggtcgcaggaagtgcgggcagtactggcctctcgagaaggattcccgcatccggttcggctttctgaccgttaccaatctgggtgtggaaaacatgaatcactataagaagaccactctcgagatccataatacagaggagcgtcaaaaacggcaagttacccatttccagttcctttcatggccagactacggtgtgccttcatcagcggcttccttaatagactttctcagggtcgtaaggaaccaacagtcattagcggtttcaaacatgggtgccaggagtaaggggcaatgccccgaacccccaatcgtggtccattgcagcgccggtataggcagaactgggacattttgttctcttgacatttgtttggcgcagttggaagagcttgggaccctcaatgtgtttcagaccgtgtcaagaatgcgaacacagcgtgctttctccattcaaacacccgaacaatattatttttgctacaaggcgattctggaattcgctgaaaaggaggggatggtctcttccggccagaatttactagccgtcgaatctcagtag

SEQ ID NO: 31536 - DNA, 396 bp, synthetic construct
  source 1..396: mol_type = other DNA; note = Synthetic coding sequence
atggctatgactgctggaaccactaccacctttccgatgtctaaccatacacgcgaaagagtcaccgttgctaagctgactctggaaaacttctattctaatttaatccttcaacacgaggaacgtgagacacgtcagaaaaaattagaagtggctatggaagaagaagggctggcagacgaggagaagaagttaagacggtctcagcacgccaggaaggagactgaatttttgaggttgaaacgcacaagactcggcctagacgactttgaatcgctgaaggtgattggtcgcggtgcattcggggaagtgcgactggttcagaaaaaagacaccggccacatttacgcgatgaagattctgcggaagtcggatatgcttgagaaagagcaatag

SEQ ID NO: 31537 - DNA, 435 bp, synthetic construct
  source 1..435: mol_type = other DNA; note = Synthetic coding sequence
atggcaagtgtagcggctgctagagctgtaccagtcggtagcggcctcagaggcctgcagcgcacactgcctctcgttgtcattctgggggcaaccggcaccgggaagtctacactcgccctccagttaggacaacgcctcgggggagaaatcgtgtccgccgactccatgcaggtgtatgaaggattggatattattacgaataaggtgtccgcacaggagcagaggatttgccgccatcacatgatatcattcgtggaccccctagtgaccaactacaccgtggtcgacttccggaatagggccactgctctcatcgaagatatattcgccagagacaagattccaatcgtcgtcgggggtaccaattattacatcgagtcactgttgtggaaagtgctggttaatacaaaggtgtccctggttcatagttag

SEQ ID NO: 31538 - DNA, 1386 bp, synthetic construct
  source 1..1386: mol_type = other DNA; note = Synthetic coding sequence
atggccgcttcttctttagaacagaagctctccagactcgaggccaaactgaagcaggagaatagagaagcacggagacggatcgacctaaatctggacataagtccacagcgccctcggccaacactccagctgccacttgctaacgatggtggatccagaagcccaagcagcgaatcctcaccccagcatcccacgcccccagccaggcctcgacacatgctgggactgcccagcacattgttcacccccagatctatggagagcattgaaatcgaccaaaaactacaagaaattatgaaacaaaccgggtacctgaccatcgggggacaggtgccaccttcactctggcgtggagaagggggtggtccagcacgtctggatccctcatgggaacgacagtggggagccggaggcggaggaaggcccggaactctgcagccgtcgttgtcaagtcagagataccaggctgagataaatgatctggaaaatcttggcgagatgggatctggcacatgcgggcaggtctggaaaatgcggttccgtaaaaccggtcacgtcattgccgtcaagcaaatgcggaggagcggaaataaggaggaaaataagcgcatcctcatggacctcgatgtggttctcaagtctcacgattgtccttatatcgtccaatgctttgggacttttattacaaataccgatgtctttattgctatggagcttatgggtacctgcgccgaaaagctgaaaaagcggatgcaagggcctattccggagcggatacttggaaagatgacagttgccatcgtgaaggcactgtactacttaaaggagaaacatggtgtcattcaccgcgatgtgaagccttcgaacatactactggacgaacgaggccagatcaaactctgtgatttcggcatctcaggaagactagtcgactcgaaggccaaaacacgcagtgcaggatgcgctgcctacatggccccagagcgaattgacccccctgaccctacgaaacccgactatgacatccgtgccgacgtgtggtccctcggaatcagtctagtggaactggccacgggacagtttccctacaaaaattgcaaaaccgattttgaggtcctcacaaaggtgttgcaggaggaaccacctttactgcccggtcatatggggttttccggggactttcagtccttcgtaaaggattgtctcaccaaggatcatcggaagcggcctaaatataacaaactccttgagcactcgttcattaaaagatacgagactttagaagtggacgtggcgtcctggttcaaagacgtaatggccaagaccgagtcaccccgtacctcaggtgtgctgtcgcagccacatctccccttctttaggtag

SEQ ID NO: 31539 - DNA, 1611 bp, synthetic construct
  source 1..1611: mol_type = other DNA; note = Synthetic coding sequence
atggagacttccgatattcaaattttctatcaggaggaccctgagtgtcagaatctgagcgagaactcttgcccaccatccgaggtctccgacaccaatctgtacagcccttttaagccccgaaattaccagctggaactggcattaccggctatgaagggcaagaataccattatttgtgcgccaacgggttgcggcaagaccttcgtgtcgctgttgatctgcgaacaccacttaaagaaatttccacaggggcagaagggcaaggtggtattctttgctaaccagatccccgtgtatgagcagcaaaagtcagtgtttagtaaatattttgagcggcatggctatcgggtgacagggatttcaggggctaccgccgagaatgtgccagtagaacaaattgtcgagaacaacgatattattattcttacgccccagatccttgtgaataatcttaagaagggtactatacctagtttgtcaattttcaccctcatgattttcgatgaatgtcataacacgagcaaacagcacccctacaatatgattatgttcaattatctggatcagaagttaggtgggagtagcggtcctttgccccaagtgatcggccttactgcatcagtcggggtaggcgacgccaagaacacagatgaagcgctggactatatttgtaagctttgcgcttctctggacgcaagcgtcatcgccacggtcaagcataatctggaagaactggagcaggttgtttacaagccgcagaagttctttcggaaggttgaatctcggatctctgacaagttcaaatacatcatcgcccaattaatgcgcgacactgaaagtttggctaagcgcatttgcaaggatctggagaacctgagtcagattcagaaccgagagtttggcacacagaagtacgaacagtggatcgtgaccgtccagaaagcttgtatggtgtttcagatgccagacaaagacgaggagagcaggatctgcaaggctctgttcctctacacgtcacatctgcggaagtacaacgacgctctgattatttcagagcacgctcgcatgaaggacgctctcgattacctgaaagacttcttctcaaatgtcagagccgctggattcgacgagatcgagcaagatcttacacagcggtttgaggagaaactgcaggaattggagagcgtcagccgggaccctagcaacgagaacccaaagctcgaagacctgtgctttatcctgcaggaggagtatcacttaaaccccgaaacaatcacaatcctgttcgtgaaaacgcgggcattggtggatgcgctcaagaactggatagagggtaatccaaaactctccttccttaaacctggcatcctaactggacgtgggaagaccaatcagaatacaggcatgacactgcctgcccagaagtgtatattagacgcctttaaagcttccggtgatcacaatatactgatcgccaccagcgtggctgatgaaggcatcgacattgctcagtgtaatctcgtgatcctttatgagtacgtggggaacgtcataaaaatgatccaaacccgcgaagaggagcaggaagtggcctctgcctccttctag

SEQ ID NO: 31540 - DNA, 2883 bp, synthetic construct
  source 1..2883: mol_type = other DNA; note = Synthetic coding sequence
atgagccgcctgatagttaagaaccttcctaatggaatgaaagaagagagattcagacaactgtttgctgcctttggaactctgaccgactgttcattgaagtttacaaaagatggcaaatttaggaagtttggatttattggatttaagagcgaggaggaagcccagaaggcccagaagcactttaataaaagttttatagacactagcaggattaccgtagaattttgcaagagctttggggatcctgcaaaacccagggcttggtccaagcacgctcagaagcctagtcagccaaaacagcctcccaaggacagcaccactccagaaattaaaaaggatgaaaaaaaaaaaaaggtggccggtcagctcgaaaagttgaaagaggatacagagttccaggaatttctaagcgttcatcaacggagagcgcaggccgcaacttgggctaacgacggattggatgccgaaccatccaagggtaagtcgaaacccgctagcgactacctcaatttcgacagcgacagcggtcaagaaagcgaagaggaaggcgcaggagaggacctggaggaggaggcgagcctggaacctaaggcagcagtacagaaagagctcagtgacatggactacctgaagtctaaaatggtgaaggctggctcctcgtcatcgagcgaggaagaggagtccgaggatgaggccgtgcactgcgacgagggatctgaggccgaagaagaggactcctcagcaacccccgtccttcaggaacgcgatagcaaaggcgctggacaggaacaggggatgccagcaggcaagaagcgcccacctgaagcacgagctgaaacggagaagcccgctaaccagaaggagcctaccacttgccacacagtaaagttacgtggcgctcctttcaacgtcactgaaaaaaacgtgatggaattcttggccccactgaaacccgtggctattaggatcgtgcgaaatgcgcatggcaataaaacaggctacatcttcgtcgacttttcaaatgaggaggaagtaaagcaagctctgaaatgcaacagggagtacatgggaggtcggtatattgaagtgttccgagaaaagaacgtgccaacaaccaagggagctcctaaaaacaccaccaagtcttggcaggggaggatcctgggagaaaacgaggaggaggaagacctggcggaatccggccgtttgtttgtgagaaatctcccctatacttctacagaggaagatttggagaaacttttttcaaagtacggaccactgtccgagctgcactatccgatagattctctgactaaaaagccgaaaggatttgcgtttattacctttatgttccccgaacacgcagtgaaagcctatagtgaagtggacggacaggtttttcagggtagaatgctgcatgtgttaccaagtactatcaagaaagaagcatcagaagatgctagtgcactgggttcttcttcctataagaagaagaaggaggctcaggacaaggcaaattctgcatcttctcataattggaacacactgttcatggggcctaacgccgtggcggatgccatagctcagaaatacaatgctacaaagagccaggttttcgatcatgagacaaagggaagtgttgctgtgcgcgtcgcactcggagagacccaactggtgcaagaggtgaggcgatttctgattgacaacggagtcagcctggattcctttagccaggccgcagccgagcgatctaaaaccgttatactcgttaagaatctgcctgctggaactctcgctgcccagctgcaggaaactttcggccatttcggctctttagggcgagtccttcttcccgagggtggaatcactgccatagtggagttcttggagcccctggaggctcggaaggcgtttcgacacctggcttatagtaaattccatcacgtgcccctatatttggagtgggccccagtgggagtgttttcttccacagctccacagaaaaaaaagctgcaagatacaccgagcgaaccgatggaaaaggatccagccgaacccgagacagttcccgacggggaaacgccagaagacgagaaccccactgaagagggagcagacaatagctcagctaagatggaggaagaggaggaagaagaggaggaggaggaggaaagcctgccgggttgtacgctattcataaaaaacctcaactttgacaccacagaggaaaagctaaaagaggtgtttagtaaggtcggcacagtgaaatcttgtagcatttcaaagaagaagaataaagccggagtgttattgtctatgggcttcggctttgtcgaatacaggaagccagaacaggcgcagaaagccctcaagcagctgcaggggcatgtggtggatgggcataaattggaagtacgcatcagcgaaagagcgacaaaaccagctgtgactctggcaaggaaaaaacaagtcccccgtaaacagacaacatctaagattctagtgcgtaacattccgtttcaggcgcattcaagggagattcgggagctgttttctacctttggggaactcaagacagtgcgtttacctaagaagatgactggtaccggcactcacagaggctttggattcgtcgactttctgaccaaacaggatgccaagcgggcttttaacgccctgtgccactcgacgcacctgtacgggagacgccttgtgctagaatgggcagactccgaggtcactctgcaggctctccgtcggaagaccgctgcccatttccacgagccacccaagaagaagagatcggttgtgctggacgaaattctcgagcagctggaaggcagcgatagcgactccgaagagcaaacattgcagttatag

SEQ ID NO: 31541 - DNA, 666 bp, synthetic construct
  source 1..666: mol_type = other DNA; note = Synthetic coding sequence
atgttagccgctggactcttggaagaattgagagacttccatcgcaggtataatcagaagaatgtatctgaaaattcgcaggattaccagcatggtatcttccagtcaatcggattcaaagagtttcatgaatacctgattacagagggcaagtgcacactcgaaacctccaatcagctcctcaaaaagggaattgaggccctgaagcaagtgactaaaaggtacgctcgcaagcagaatagatgggtgaagaatagatttctctctcgccctgggcctatcgttccaccagtttacggcctggaagtctctgatgttagtaagtgggaagagagtgtacttgagccggcattggagattgtgcagtcattcatacagggtcataaacctacggcaactcctatcaagatgccatataatgaggcagagaataagagatcctatcacctgtgcgatctctgcgaccggattattatcggagatcgggagtgggccgctcatattaagtctaagtcacacctaaaccagttaaagaagcggagacgccttgactctgatgccgtgaataccatcgaaagccagtccgtcagtcccgaccacaacaaggaacctaaggagaagggatcaccagggcagaacgatcaggagctgaaatgttctgtttag

SEQ ID NO: 31542 - DNA, 2649 bp, synthetic construct
  source 1..2649: mol_type = other DNA; note = Synthetic coding sequence
atgcccagagtcaagcccaaactggagaagcagttgcaaaaagataaagaaaaagtagaagagttcaagtcaattcccgctaagtctaacaacatcatcaatgaaacaaccactcgcaacaacgcactggaaaaggagaaagagaaggaagaaaaaaagctcaaagaagtcatggacagcctgaagcaggaaactcagggattgcagaaggaaaaagaatctcgggaaaaagaattgatggggtttagtaagtctgtgaatgaagccaggtctaagatggacgtcgctcaaagcgagctagacatttacttgtcccgacacaataccgcggtttcacagctcaccaaggccaaggaggccctgattgccgctagcgagaccctgaaggagcgaaaggctgctatcagagacatcgagggaaagctgccacagaccgaacaggaattaaaggagaaggagaaggaactgcagaagcttacccaggaagaaactaactttaaatctctggttcatgatctgttccagaaggtggaagaagccaagtcatctttagccatgaatcgctcaagggggaaggtgttagacgccattatacaggagaaaaagagcggccgaatccctggtatctacggaagattaggtgacctcggggctatcgatgaaaaatacgacgtagccataagttcatgttgccacgccctggactacattgtggtggacagcatcgacatagcccaggaatgtgtgaacttccttaaaagacaaaacatcggagtggcgactttcataggcctcgataaaatggccgtctgggctaagaaaatgacggaaattcagactcccgagaataccccccgactgttcgatctcgtcaaagtgaaggacgagaaaataagacaggccttttacttcgctctgagagatacacttgtggcagataatttagaccaggcgacgcgcgtggcatatcagaaggatagacggtggcgggttgtaactctccaaggacagattattgagcaatcggggaccatgacaggtgggggtagcaaggtcatgaagggtaggatggggtcatccctcgttattgagatcagcgaggaggaggtaaataagatggaaagccagcttcagaatgattcgaaaaaggcaatgcagattcaggagcagaaggtgcagttagaggaaagggtcgtcaagcttcggcactccgaacgagaaatgaggaatacactggagaaatttaccgcaagtatacagaggcttatcgagcaagaggaatacctgaatgtccaggtcaaggagttggaagctaacgttctggccactgcccctgacaagaagaagcagaagcttttggaagagaatgtgtcagcctttaagactgaatacgacgctgtcgctgagaaagccggtaaagtggaagccgaagtcaagcgactccataatactattgtagagattaacaatcacaaactgaaagcccagcaggacaagctcgataaaatcaataagcagttagacgagtgtgcaagcgccattaccaaagcacaagtcgcaattaagacagcagatcggaacctgcagaaggctcaggattctgtcctcagaaccgagaaagaaatcaaagacactgaaaaagaggttgacgacctgacagccgaactcaagtctctggaggataaagccgctgaggttgtgaagaacacgaacgccgcagaggagtctctccctgaaattcagaaggagcaccggaacctgttgcaggaattaaaagtaatacaagaaaacgagcatgctttacagaaggacgctctgagtatcaagctgaagcttgagcagatcgacggtcacatcgcggaacacaattccaaaattaagtactggcacaaggaaatctccaagatttctctccatcccatcgaagacaatccaatcgaggaaatctctgtgctctctcccgaagacctggaggcgattaagaatcccgactcaatcacaaaccagatcgcactgctagaagcccgatgtcacgaaatgaaacctaacttgggtgcaattgccgagtataagaagaaagaggagctctacctgcaacgtgttgcagagctggacaaaataacttatgaaagggacagctttcggcaggcctacgaggacttgagaaaacagaggctcaacgagtttatggcgggtttctatataatcactaataagctgaaagaaaactatcagatgctgacccttggaggtgacgctgaacttgaactggtcgactcactggaccctttcagcgaaggaattatgttttcggtgagaccccctaagaaatcttggaagaaaatttttaacctgtccggaggcgaaaaaaccctgtcaagcctggcgctggtattcgccttgcatcactacaagcccacccccctatatttcatggatgagatcgatgccgcactcgacttcaaaaatgtgtcgatcgtggccttctacatctatgagcagaccaaaaatgcccagtttataattatttccctgcgcaataacatgtttgagataagtgaccggctgattggaatctataaaacatataacataacaaaatcagtcgccgtgaaccccaaggagattgctagtaagggtctgtgttag

SEQ ID NO: 31543 - DNA, 1038 bp, synthetic construct
  source 1..1038: mol_type = other DNA; note = Synthetic coding sequence
atgttcctcacccggcctaaggtctgcgtggacctcaatagaagggtgactttatatggcgttttcactatacacttcagtcctaatgttccatctagatgccttcttctggagctattagatgtgagtgtctccgagttgcttttgtactcaagtcaccagggatgctcaatgtggatgatccagcactgcgcccgtgatgtcctcgaggcgctggctttcctgcatcatgaaggctacgtgcatgctgacctgaaaccacgtaacatcttgtggtccgcagagaatgagtgcttcaaactgattgattttggacttagtttcaaggagggcaaccaggacgtgaagtatatccaaacagacgggtatcgggctccagaagctgaactccagaactgcctcgcgcaggccggattgcagtcagacactgaatgtacatccgccgtggacctctggtcactgggcataatcttactggagatgtttagcggtatgaagctgaagcatacagtgcgcagtcaagagtggaaggccaattctagtgcgatcattgaccatattttcgcttctaaggctgtcgtcaacgccgctataccagcctatcacctacgcgacctgatcaagagcatgttgcacgatgacccaagccgcagaatcccggctgagatggctctttgcagtcccttcttcagcatacctttcgcgccacatatcgaagatctcgtaatgttgccaacacctgtgctccgtctgctgaacgtccttgacgatgattacctcgaaaatgaggaagagtacgaggatgtggtggaggatgtcaaagaggaatgtcagaagtacggccctgtggtctctcttcttgtccccaaagaaaacccagggcgtggacaagtttttgttgagtacgcaaacgccggagatagtaaggctgcacagaagctgttgacgggtaggatgtttgacggcaaattcgtggttgccacattttatcctctgtcagcctataagagggggtatctgtaccagacccttctttag

SEQ ID NO: 31544 - DNA, 954 bp, synthetic construct
  source 1..954: mol_type = other DNA; note = Synthetic coding sequence
atgtggctcgcgagggaaggcatagttgccccacttcccggtgaatggaagccatgtcaagacattactggtgacatttattatttcaactttgcgaacgggcagtcaatgtgggaccatccctgcgatgaacattaccggtctctggtgatccaggagcgggcaaagttgagcacctcaggcgcaattaaaaagaagaaaaaaaagaaggagaagaaggacaagaaggatcgcgacccgccaaaaagctcgcttgaaacacagccggaggaagggctgttgccaccttcttcattcctctgcagtctcagtcctcccagtgctcccggattggccgacctcgacctggaccaggagatgcaggctatatcagaagggagctataacaagggcaagtctcccggaatgcttggagacactccatggcggttcatgggggctcttcctaggaagcttcaacctctgagcaaagggcaacctagtcaaattcaccaagtgttcgccgacatggagaaaatccttgggcgagccccagcacaatgtcgcagggaactcggagaccaacaaggactggaaaagctgcagaaggcaaccgaaaaaatctatctcggcttctctgaccccgagacagaggaactcgagatgcggagtcgccagcagaaactgggcacacctgccccacagaacaccgggctgctgcagaacatgcaagatgttgttgagagcaggaaccaggcatctgtgcactctaagctgagcgaagcaatcaaaggactgccacttaagggcgaacaacattcccactccctagcgaagctgagccctacagggccaggcggagataagggacagtcacccatcccaatgtggatatgctgtcgcctgcgggcaagcaactgtcgcaacacctcagccgcatggagactcaagctgaagcgatccagtacttgctag

SEQ ID NO: 31545 - DNA, 162 bp, synthetic construct
  source 1..162: mol_type = other DNA; note = Synthetic coding sequence
atgggaaattccgactcccagtacactctgcagggatctaaaaatcactctaataccattacaggtgccaagcagattccatgcagccttaagattaggggcattcatgctaaggaagagaaaagtcttcacggctgggggcatggatccaatggagcatag

SEQ ID NO: 31546 - DNA, 1203 bp, synthetic construct
  source 1..1203: mol_type = other DNA; note = Synthetic coding sequence
gcatggctgcaaagtgccggtgaactgcctagtgacggcggatgttccaggctgagatggcaggcccacctcgaatttacccataatcatgatgtcggcgatctgacatgggataagattgctgtgagcctccccagaagcgaaaagcttagatctcttgttctggcaggtattccacatggcatgagacctcagctctggatgcggttgtccggggcactccaaaagaaaagaaattcagagctgagttatcgagaaatcgttaaaaacagttcaaacgatgagacgatcgctgccaagcagatcgagaaagaccttttaagaaccatgccatcaaacgcttgttttgctagcatggggagcatcggggtgcccaggctcaggagagtgctccgcgcattagcctggctctatccggagattggatactgtcagggaacgggtatggtagccgcttgtctgctcctgttcctcgaagaggaagacgccttttggatgatgtccgcgattattgaggacctgcttcctgcatcttatttcagcactaccctcctgggcgttcagacagaccagcgcgtgctccggcaccttattgtacagtacctgccaagactagataaattgctgcaggaacacgatatagaactgagtctgatcacgctgcactggtttctcaccgcctttgcttctgttgtggatatcaagctgctgcttagaatttgggacctgtttttttatgaaggtagccgagtgctgttccagctaacactaggcatgttgcatcttaaagaagaggaacttattcagagcgagaattctgcaagcatctttaatactctcagcgacatcccttcgcaaatggaagacgcagaactgcttttgggtgttgcgatgagactggctgggagcctgactgatgtcgccgtcgagacacagcggaggaagcatctcgcttacttgatcgccgatcagggccagctgcttggcgcaggcaccttgacgaacttgagtcaagtggcccaggatggcggacctcatcttgacccccaacacaccgggaggcggggacacctcgaggtgcagagcgcaggagctgctgagaacaagcccgcattgccagccttgccaccgagccttgcccagagtgaccactcttgtggtgtcatccaggcttctagcgggtttgtccatctgaggttctag

SEQ ID NO: 31547 - DNA, 294 bp, synthetic construct
  source 1..294: mol_type = other DNA; note = Synthetic coding sequence
atgctgagggggacaaaggagatggataatatgtctcctcgcctgcgggctttccttagcgaacctatcggagaaaaggatgtgtgctgggtggatgggatttctcatgaactcgcaatcaacctggtgaccaaaggcattaacaaggcgtatattctgctgggccagtttctcttaatgcacaagaacgaggccgaattccagcgttggctaatttgctgcttcggggcaactgagtgcgaggcccagcagacttcgcactgtctcaaggagtggtgcgcctgcttcctgtag

SEQ ID NO: 31548 - DNA, 1011 bp, synthetic construct
  source 1..1011: mol_type = other DNA; note = Synthetic coding sequence
atggagtatcttggaggtggctccgctctggacctcctgaagccagggcctctggaggagacatacattgccacaattttgagagagatccttaaggggctcgattaccttcactctgagaggaagattcaccgtgatatcaaggcagccaatgtcctgctgagtgagcagggcgatgtgaaactggccgactttggagtcgctgggcaattgaccgacacgcagatcaagcgcaacaccttcgtaggcaccccgttctggatggcgccagaagtaataaagcagtccgcctacgatttcaaagccgatatttggagcttgggaatcaccgccattgagctggcaaagggagagccccctaactccgacctccaccccatgcgcgtgctgttcctgatcccaaagaacagtcctcctactctggaaggccagcattcaaaaccgtttaaagagttcgttgaagcttgtttgaataaggatccacgttttcgccctactgctaaggaactgctcaaacacaagttcatcacgagatacactaagaaaacaagttttcttaccgagctcattgatagatacaaacgatggaaaagcgagggccacggagaggaaagctcctcggaggattccgacattgacggggaggccgaagatggcgaacaggggcctatatggacttttcctccaacaatccgcccaagtccccatagcaagttacataaaggaaccgccttgcattccagtcaaaagcccgcagagccagtaaagcgccagccgagatctcaatgccttagcacgttagtgcggccagtcttcggggaggtgttctctcagttgaaggagaagcacaaacagtccggcggatccgttggagcccttgaggaactagagaatgctttcagtttagccgaggagtcttgtcccggaatttctgataaacttatggttcacctggtggaacgtgtccagcgctttagtcataaccggaatcacttgacttccacgcgttag

SEQ ID NO: 31549 - DNA, 1455 bp, synthetic construct
  source 1..1455: mol_type = other DNA; note = Synthetic coding sequence
atggtgcacgaaacctcctatagtgctcaatttaagggtgaggcatccaaaccaaccaccgctgataacaaggtcattgataggcggagaatccgctccttgtacagtgaacccttcaaagaacccccaaaggttgagaaaccttcagtccagtcctcaaagcccaagaagacaagcgctagccataagcccacccgaaaagcgaaagataaacaggcagtgtccgggcaagcggctaaaaaaaaatcggcggagggcccttctaccacaaaacctgatgacaaagagcagtcgaaagagatgaacaacaagctcgcggaggctaaagagagtttagcccagccggtgagtgacagcagtaagacacagggccctgtggccaccgagcccgataaagatcaggggagtgtcgtgccgggtctgctcaagggtcagggacctatggttcaggaaccccttaaaaagcagggttctgtagtacccggacctcccaaagaccttgggccaatgatccccttgccagtcaaagatcaggatcacactgtgcccgagcctcttaaaaatgagtcccctgttatcagcgcccctgtgaaggatcaaggaccaagcgtgccagtccctcctaagaaccagtctcccatggtgcctgcaaaagttaaggaccaggggtctgttgttccagagtccttgaaagatcaagggccacgaattcccgagcctgtgaagaaccaggcaccaatggtacccgctcccgtcaaggacgagggtcccatggtgagcgcttcggtgaaggatcaagggcctatggtatcagcccctgtcaaggaccaaggacccattgtgcctgcacctgtcaaaggagagggacccattgtaccagccccagttaaggatgagggccctatggtgtccgccccaattaaggaccaggacccgatggtgccagagcaccccaaagacgaatccgctatggccaccgcccctattaagaaccagggctccatggtgagcgagccagtcaaaaaccagggtctggtagtctcgggtccagtgaaagaccaggacgttgtggtgccagagcatgctaaagtccatgactcggctgtggtggcccctgtcaagaatcaggggcctgtggtgcccgagtctgttaagaaccaggaccccattctacccgtgctggtgaaagatcagggccctaccgtgctgcagccacccaaaaatcagggcagaattgtcccggagccccttaagaatcaggtccccattgttcctgttccactcaaggatcaagatcctcttgtgcccgttcctgcaaaagaccagggcccagcggtaccggaaccacttaagactcaggggcctcgggaccctcagctgccaaccgtctcacctctacctcgggtaatgattccaaccgctcctcataccgaatatatcgagagtagcccttag

SEQ ID NO: 31550 - DNA, 2103 bp, synthetic construct
  source 1..2103: mol_type = other DNA; note = Synthetic coding sequence
atggccctgggggaggaaaaggctgaagcggaggccagtgaggatacaaaggcgcagtcctacggcaggggctcctgcagagagcagccacccaggctggaggctgaagggggactgatttcacccgtatggggagccgaaggaattcccgcacccacatgctggattggaacagatcctggcggaccaagccgggcacaccagcctcaggcctctgatgcaaatagggagccggtggctgagcggagtgaaccagcactcagcggtctgccccctgccactatggggtccggcgacctcctgcttagtggggagagtcaggtagaaaagactaagctgtccagctctgaagagttcccccagacattaagccttccccgtaccacaacaatttgcagtggacacgacgccgataccgaggacgatccctcccttgccgatctgccccaggctctcgacctgtcccaacagccccattcaagtggccttagctgtctgtcacagtggaagtcagtcctctcaccgggtagcgcagcacagccttcttcttgtagcatatctgcctcaagcaccgggagctccttacagggccatcaagagcgggcagaaccaagaggagggagcctcgctaaggtgtctagcagcttggagcccgttgtgccccaggagcctagttccgtggtgggactgggccctcgccctcagtggagcccccagcctgtctttagcggaggtgacgccagcggcctgggaagacggaggttgagttttcaagccgaatattgggcttgcgtcctgcccgactccctccccccatcccctgatagacattctcccctgtggaacccaaataaggagtatgaagacctcctcgactacacctatcctctgaggcccggaccacaactgcctaaacacctggacagtagagtaccagcagatccagttcttcaggactcgggagtggacttggactccttcagcgtatctccagcaagcacgctcaagtcacctacgaacgtgtcaccaaattgcccacccgctgaggctacagccttgcctttttcaggaccaagggagccctcactcaagcaatggccgtctagggttccgcagaaacagggcggaatggggctcgccagttggtctcagctagctagtacccccagggcaccaggctcacgtgacgctcggtgggaacggagagaacccgctctgcggggtgccaaagatagattgacaatcgggaaacatctggacatgggctcaccccagctgcgtactagagacagaggatggccttcccccaggccagagagggaaaagcgcactagccagtccgcacggaggcccacttgcaccgaatccaggtggaaatcggaggaggaggttgagagcgacgatgaatacctggcactgcccgctaggctcactcaggtttcttcgctggtcagctatctggggagtataagcacgctggtcaccttacccacaggcgacatcaagggacagtctcccctcgaggtgtcagactctgacgggcctgcctctttcccttcgagcagttcccaatcacagctaccaccaggtgccgctctccaaggctctggagaccccgagggccagaatccctgcttcctgcggtcgtttgttagggcccatgattctgctggtgaaggcagtctgggatcttctcaggccctcggtgtcagctcaggactcctcaaaacccggccttccctgccagcccgacttgacagatggcctttttccgaccccgacgtagaaggacagttaccccgtaaaggcggtgagcagggtaaggagagcctcgtccaatgcgtgaaaaccttttgctgtcagctggaagaacttatttgttggctgtacaatgtggcggacgtgaccgaccacggaactgccgcacgatctaacctaacatctctgaagagctccctgcagctgtacagggtgatctgcgggcctgggtctggattgttccctcataaatctgtagccaaattactggactacaaagttaagtcccagatcacaaacgtatggtacgtgatagcacagctgaccattatcccagagatttag

SEQ ID NO: 31551 - DNA, 1626 bp, synthetic construct
  source 1..1626: mol_type = other DNA; note = Synthetic coding sequence
atgaaaagttatgtttcagagacaatggctagcccaggaaaagacaattaccggatgaaatcatataagaataacgctctcaacccggaggagatgcgcagacgaagggaagaggagggaatacagcttagaaagcaaaagagagaacagcagctcttcaagcggagaaacgtggaactgattaacgaggaagccgctatgtttgacagtctacttatggattcatacgtgtctagtactaccggagagagcgtgatcacgagggaaatggtggagatgttgttctccgacgatagtgacctgcagctggctacaacccagaaattccggaagctgctctctaaagagccaagcccccctatagatgaggtcattaatacccccagggttgtagacaggtttgttgagtttctcaagaggaacgaaaactgtactctgcagtttgaggctgcttgggctttaacgaacattgcgtcagggacctcacagcagaccaagatagtgatcgaagctggagccgttccgatctttattgagctgctcaactccgatttcgaggacgtgcaggaacaggcagtgtgggcactgggtaatatcgccggagactcttcagtttgccgcgattacgtcctgaattgctctatcttgaatccccttctgaccctgctcacgaagtcaaccaggctcacaatgacacggaatgcagtgtgggcgttaagtaatctctgtcgaggtaagaaccccccacctgaatttgccaaagtgtcgccttgccttcccgtgttgagcagacttctgttctcatcagacagcgatctgctggccgatgcctgttgggccctttcgtatctaagcgatggccctaatgaaaagattcaggccgttatcgactccggcgtgtgccgacggttggtggagcttctgatgcataacgattacaaggtcgcctccccagctctgcgagctgtcggcaacatagtaaccggagatgacatccaaacacaggtgatcttgaactgttcggcgctgccttgtctgttgcatctgctttcctctccaaaggagtcgatccggaaggaggcttgttggactatctccaacatcactgctggaaatcgtgcccagattcaggcagtaattgatgcaaacatctttccagtgttgattgagattctgcagaaggccgaattcaggactagaaaagaagctgcctgggcaatcacaaatgccacctcaggaggaacccctgagcagattagatatcttgtttccttagggtgtataaagccactgtgtgatctcctcactgtgatggattctaagattgttcaagtcgctctgaacggtttggaaaatatcctgagactcggcgaacaagaggggaagcgaagcggcagcggtgtaaatccttattgcggtttaattgaggaagcatatggactggacaagattgaattcttgcagtcgcatgaaaatcaagagatctaccaaaaggcgttcgatctcatcgagcactattttggcgtggaagacgatgattccagcttagcccctcaggtcgacgagacacaacagcagtttatctttcagcagccggaggcccctatggaggggtttcagctctag

SEQ ID NO: 31552 - DNA, 1716 bp, synthetic construct
  source 1..1716: mol_type = other DNA; note = Synthetic coding sequence
atgttagactgcggcatgcacatggggttcaacgatgacaggcgatttcctgatttctcttatatcacgcagaacgggcgactgactgactttctggactgcgtcattatctcacactttcacctcgatcactgtggagccctgccttacttctctgagatggtgggatatgatggacccatctacatgacacaccctactcaagccatatgcccaattttgctggaggattataggaaaatcgctgtggacaagaaaggggaggccaattttttcacatcccaaatgatcaaagattgtatgaagaaggtggtggccgtgcacctgcaccaaacagtccaggtagatgacgaactggaaatcaaggcgtactatgccggtcacgtacttggcgcagcaatgtttcagattaaggtgggctctgagagcgtggtgtataccggagactacaacatgacgcctgacaggcatctgggggctgcttggatcgataagtgccgacctaacttgctcatcaccgaaagtacatatgcaaccaccattagggactctaagcgctgtagggagcgagattttctgaaaaaggttcacgagactgtggaacgtggagggaaggtgctcattcctgtcttcgccttgggaagagcccaggaactgtgtattctgctggaaaccttttgggagcgaatgaacctcaaagtgcccatctacttttctacaggtctcacagagaaagcaaatcattattacaaactcttcatcccgtggactaatcagaaaattcggaaaacattcgtgcaacgaaatatgtttgaatttaagcacataaaagcttttgacagggccttcgccgacaatccaggccctatggtggtcttcgccactccaggaatgttgcacgcgggtcaaagtttgcaaatctttcggaagtgggcagggaacgagaagaacatggtgatcatgccaggatattgcgtgcaagggaccgtcggccataagatcctgtcaggccagcgcaagctggagatggaaggcaggcaggtgctggaagtcaaaatgcaagtggaatatatgtcattctcagcccatgcagatgccaaaggcattatgcagctcgtgggccaagccgagcccgagagcgtgctcttggtacacggcgaggccaagaagatggagttcctcaagcagaagatcgaacaggaactgcgcgtgaactgttacatgccagccaacggcgagacagtgacgctgccaacctcaccttctatccctgttggaatatcgttgggcttactcaagagggaaatggctcaggggctattgcctgaggctaaaaagcctagattacttcatggaactctgattatgaaagactctaacttccgtctggtgtctagcgagcaagcactgaaggagctgggtctggcagagcaccagcttaggttcacctgtcgtgtgcaccttcatgatacacgcaaagagcaggaaacagcgctcagagtgtacagccatcttaagtctgtactgaaagatcactgtgtgcagcacttgcccgatgggagcgtcaccgtggaaagcgtgctcctgcaggctgcggctccttcagaggatccgggaactaaggtgctgttggttagctggacataccaggatgaggaactgggctcattcttgacttctctgctgaagaaaggtttaccccaggcccctagttag

SEQ ID NO: 31553 - DNA, 2232 bp, synthetic construct
  source 1..2232: mol_type = other DNA; note = Synthetic coding sequence
atggaggcagccgctgtgacagtcactaggtctgccactaggcgcagacggagacaacttcagggcctcgctgcgcctgaggccggtacccaagaggaacaggaggaccaagaacctcgacctcgcaggaggagacccggacgcagtattaaggacgaagaagaggagacagtcttcagggaggtcgtcagtttctcaccagatcccctccctgtgcgttactacgataaagacacgaccaagccaattagcttttacctctcaagcctcgaggaacttctcgcctggaagcccagactcgaggatgggttcaacgtcgccctggagccactcgcctgccgccagcctccactcagttcgcagcggcctcggaccctcttatgccatgatatgatgggtggctacctggatgaccggttcattcagggctctgtggttcagaccccttacgccttttaccattggcagtgcatcgatgtttttgtatatttctctcatcacactgtgactatccctcctgtgggttggaccaacacagcccacaggcacggagtgtgcgtgctcggcacgttcattaccgagtggaatgaaggcggaaggttgtgcgaagccttcctagcaggtgacgagcggtcctaccaagccgtggctgataggctggtgcaaatcacacagtttttcagattcgatggatggctaattaatattgagaattcattaagcctggctgctgtcggaaacatgccccctttcctcagatacttgaccactcagctgcataggcaggtgccgggaggcctggtgctgtggtacgactctgtcgtgcagagcggccagcttaaatggcaggatgagttaaatcagcacaacagggttttcttcgatagctgcgatggtttctttaccaactataactggcgggaggaacatttggagagaatgctgggtcaagctggcgaacgcagagctgatgtgtatgtcggagttgatgtgtttgccaggggcaacgtggtggggggaaggtttgacacggacaagtcattggagctcatccgcaaacacggcttcagtgttgctctcttcgcacctggatgggtgtatgaatgtctggaaaagaaggacttcttccaaaatcaagacaaattctggggcaggctagagcgctatctaccaacccattccatctgcagtttacctttcgttacatccttttgtctgggcatgggcgcaaggagagtctgctacggccaggaggaggcagtaggcccttggtatcaccttagcgcccaggaaattcagcctctgtttggagagcatcggctcggaggagatggcagggggtgggttagaacccactgttgcttggaagacgcatggcatggtggttcctcgcttttggtgcgaggtgtgataccacctgaggtcgggaatgtggccgttaggctgttttcacttcaggcacccgtcccccctaaaatatacctctctatggtttataagttggaaggacccaccgacgtgacagtggcgctggaactgaccacaggggatgctggatcatgccatattggtgggatttcagtgctgaacgcagaaacttccagtagacactccctgagacctctgagagtgcctcccacaaaattagccaggtgggtcggcagatgcggcagacagttatccggtggatgggttcaacattgctatgaggtctccctgaggggttgccttctgctggacttgctcgtctgctttagcagaccacccggttcaagggaggaggaatcctttacatgtcgactcggcgagattcaggtggtcgatgccgctagcttactggcaccactgccccaggttcaggccgtaaccattagtcacattaggtggcagccatctgcatctgagcgggaggggccaccggctcttctacagcttagttgcacgctccactggagcttcctgctcagtcaggtgcgctgcttccgtattcactgctgggggggaatgtctgacgattctcccggaagagaactgcctaggcccgaaatgccaatgttcctgggactagccttcgccacgcagtatcgcatagtcgacctactggtcgaggcggcaggcccagggcaggatcgaaggatggagtttctcgtggagcctgtccccaaagaagggtttcgagtccctcaagcagagtggggcagagcagttctgttatattccgccccagcatag

SEQ ID NO: 31554 - DNA, 396 bp, synthetic construct
  source 1..396: mol_type = other DNA; note = Synthetic coding sequence
atggagctccgcgttcatatggtctctcacactggggagatgccatataaggtcaggctggggctatctccaggccctgggcttggagggcctcgtatcctccctgccgaacctttcacatggggtgccgtaaggcatctcccccatagtagctgccagggcgcttgtcttccgtgtctcccctgcctcagcagcgcccctctgtccaggcaggggctctccgcggcttctccccctagatccttgcttgggccttgtttctttccgtggcgtacaggccttgcctccagcggacagttgagtcccgaggccctgctttgcaccatattgcatacacgcagcggggtgctgccagaatccagtcatcgcggattacccctggtcccagccctgtag

SEQ ID NO: 31555 - DNA, 909 bp, synthetic construct
  source 1..909: mol_type = other DNA; note = Synthetic coding sequence
atggagcacggcattgtgaaagattggaacgacatggagcgcatttggcagtacgtctattcaaaagaccaactgcagactttcagcgaggaacaccccgtgctgctgactgaggcacctcttaatccacgtaagaatcgagagcgcgcagcggaagtttttttcgagactttcaatgtgcccgcactgttcattagtatgcaggctgttttgtcactgtatgcaaccgggagaacaacgggcgtcgttcttgactctggcgacggagttacacacgctgtccccatctacgaaggtttcgctatgccacattctatcatgaggatagacattgcgggacgggacgtgtcccggttcttgagactgtacctcagaaaagaagggtacgattttcactcatcatcagagtttgaaattgtgaaggccattaaggagagagcatgttacctaagtatcaacccgcagaaggacgagaccctagaaactgagaaggcccagtattatctgcccgatgggtcaacaatcgagattgggccatccaggttcagggctcctgaattgttgttcagacccgatctcattggcgaggagtccgaaggtatccatgaagtgctggtgttcgccatccaaaagtccgacatggacttacgacgcaccttgtttagtaatatcgtactcagcggaggttccacgctttttaaggggttcggcgaccgcctgttgagcgaggtcaagaaactggcccctaaggacgtgaagattaggatcagcgccccacaggagaggctgtatagtacctggattgggggttctatcctcgcctctctggacaccttcaagaagatgtgggtttccaagaaagaatatgaggaggacggtgcaagatccattcatagaaaaactttttag

SEQ ID NO: 31556 - DNA, 780 bp, synthetic construct
  source 1..780: mol_type = other DNA; note = Synthetic coding sequence
atgttacggtgtgggcagatgatgcttgcccaggccctgatttgcagacacctaggacgagattggtcttgggaaaagcaaaaggaacagcccaaagaataccagagaattctccagtgcttcttggataggaaggactgctgttatagtatccaccagatggcacagatgggtgtgggcgaggggaagtctataggtgagtggtttggtcccaatactgtggcccaggtgctgaagaagctggctctgttcgatgaatggaactctctagccgtctatgtatcgatggataacactgtagtcatcgaggacataaagaaaatgtgtcgggtactcccactgagcgccgatactgcaggcgataggccaccggattccctgactgcctcaaatcaatccgacgaactgatcttcctcgacccacacacaactcagacattcgtggatactgaggagaacggtaccgttaacgatcagacttttcattgcttacaatcaccccagagaatgaatattttaaatctggacccctccgtcgcacttgggttcttttgcaaggaggagaaggattttgacaattggtgttcgctggtgcagaaggaaatattgaaggaaaacctccggatgtttgaattggttcagaagcacccttcccattggcccccttttgtgccaccagctaaacccgaggtgactaccaccggagctgagtttattgatagcacggaacaactagaggagttcgacctggaggaagacttcgagatcctgtccgtctag

SEQ ID NO: 31557 - DNA, 957 bp, synthetic construct
  source 1..957: mol_type = other DNA; note = Synthetic coding sequence
atgcgggcacagagcgacgagctggagaaaattgaaaaacatggtagaagctccaaggacaaggaaaatgccaagtcattagacaagcctgaacagtttctttacgagctctcgctcatacccaatttttcagagcgagtgttttgcatcctcttccaatccacattttccgaaagtatttgtagcatcagaaggaaactggagctgttgcagaaattgtgtgagacacttaagaacggcccaggtgtgatgcaggtgttaggcttggtcctggccttcggcaactatatgaatggcggaaacaaaacacgtgggcaggccgatggctttgggctggacatcctcccgaagttgaaggacgtgaaatctagcgacaactctagatcactcctgagttatattgtttcctattatctcaggaactttgatgaggatgcaggcaaagagcagtgcctctttccactgccagagccccaggatctgttccaggcatcacagatgaagtttgaagactttcagaaggacctccggaagctcaagaaggatcttaaagcctgtgaggtggaggctgggaaggtgtaccaggtctctagcaaagagcatatgcaacctttcaaggagaatatggagcaattcattattcaggccaaaatcgaccaagaggccgaggaaaactccctgaccgagacacacaagtgcttcctggagactacggcctacttcttcatgaaaccaaaactcggggaaaaagaggtaagtccaaacgccttcttcagcatttggcatgagttctcaagcgatttcaaagacttctggaaaaaagaaaataaactgttgctccaagagcgagtgaaagaagcagaagaagtgtgtagacagaagaaagggaagtctttgtataaaattaagcctcgacatgactctggcatcaaggctaagatcagtatgaagacctag

SEQ ID NO: 31558 - DNA, 345 bp, synthetic construct
  source 1..345: mol_type = other DNA; note = Synthetic coding sequence
atgtcctctagtatgtggtatattatgcagagcatccagagcaagtacagcctttctgagcggctgatccgtactatcgctgctattcggagcttcccccatgacaatgtggaagacttgatccgtgggggagccgacgtcaattgcacccatggaaccctgaaacccctacattgcgcttgcatggtgtctgacgccgattgcgtcgagttgctacttgagaagggagctgaggtcaatgccctggacggatacaaccggacagcactccactacgccgctgaaaaagatgaggcttgtgtcgaagtcctcctggagtatggagccaatccaaatgcactctag

SEQ ID NO: 31559 - DNA, 1365 bp, synthetic construct
  source 1..1365: mol_type = other DNA; note = Synthetic coding sequence
atgtcaacttttcgccaggaagatgtcgaagatcactacgagatgggggaggagttaggaagcggccagtttgctatcgtccgaaagtgtcggcagaaaggcacggggaaagaatatgccgcaaaattcattaaaaagagacggctctcttcatctcggagaggggttagccgcgaggagatcgagagagaagtgaatattctaagagagataagacatccgaacatcatcaccctgcacgacatctttgaaaataagacagatgtcgtgctcatcctcgagctggtctctggtggcgaactgttcgactttttggcagagaaagagtccctgaccgaagacgaagcgactcagtttttaaaacaaatcctggatggcgtacattacctgcattcaaaacggattgctcactttgacctgaagcctgagaatattatgctccttgataagaacgtgcccaaccccagaatcaagcttatcgactttggcattgcccataaaatcgaagccggtaacgaattcaaaaatatttttggcactcctgaatttgtggcccctgagatcgtcaactatgaacctctgggattggaggccgatatgtggagtatcggggtaattacatatatattgctaagcggggctagcccattcctgggagagacgaaacaggagacactgacaaacatcagtgctgtcaactatgactttgatgaagagtacttcagcaacacttcagagctggccaaggactttatccgaaggctcttagtgaaggaccctaagaggaggatgaccatcgctcaaagcttggagcacagttggattaaggccattcgccgacgaaatgtaagaggggaggactcaggtagaaaacccgagcgaaggaggctgaagacaacacgcctgaaagagtacactataaagagccattcctctctcccccctaacaatagttacgctgattttgagaggtttagtaaagtactggaggaagcagccgctgctgaggagggcctgagggagctgcaaagatcaaggcgactgtgccatgaagacgtggaggcattagctgcaatctatgaggagaaggaggcatggtatagagaggagtccgactctttgggccaggatctgcggcgactgcggcaagagctcttgaaaacagaggcgttgaaaagacaagcacaagaggaggccaaaggcgctctccttgggacctctgggctgaagcgcagattctctcggttggaaaatcggtacgaggctctagctaaacaggttgccagtgagatgcggtttgttcaggacctcgtgagggccttggagcaggaaaagctacaaggtgtggaatgcggactgagatag

SEQ ID NO: 31560 - DNA, 1047 bp, synthetic construct
  source 1..1047: mol_type = other DNA; note = Synthetic coding sequence
atgggtaaggattattataaaatcttgggcatacccagtggagctaatgaagacgaaataaagaaggcctataggaagatggctcttaaataccacccagacaagaataaggaaccgaacgccgaagagaagttcaaggaaattgcagaggcgtacgacgtactgtctgaccccaagaagagaggactctatgaccaatatggagaagaaggtctgaagacgggcggaggcacaagcggcggttcctctggcagctttcactatacattccacggcgatcctcatgcaacttttgcctccttctttggtgggagcaatccatttgacatctttttcgctagctctaggtccacacggcctttctcagggtttgaccccgatgatatggacgtggacgaggacgaggacccattcggggcatttggcaggttcgggttcaacgggctgagcagaggtcctcgacgagctcccgagcctctctaccctaggcggaaggtgcaagaccccccagtagttcatgaacttcgtgtttcactggaggagatctaccacgggtcgactaaaagaatgaaaattacacgcaggcgcctcaacccggatggccgtaccgtccggaccgaagacaagatcttgcacattgtgatcaagcgaggatggaaggaaggtaccaagattacgtttcctaaagagggagacgccacccctgataatatacccgctgacatagttttcgtgctcaaggacaaaccccacgcacattttcggagagacgggactaacgttctgtatagcgcattgatttccttgaaggaggccctgtgcggttgtacagttaatatccccaccatcgacgggagggtgatccccttaccttgtaacgacgtgatcaagccgggaaccgtgaagcgtctgcgtggagaggggctgccctttcctaaggtcccgactcagcgtggagacctgattgtggaattcaaggtcagatttccagaccgtttgactccgcagactcgtcaaatcctgaaacagcatcttccctgcagttag

SEQ ID NO: 31561 - DNA, 2163 bp, synthetic construct
  source 1..2163: mol_type = other DNA; note = Synthetic coding sequence
atgtatggtagcgctaggtctgtcggaaaagttgaaccttctagtcaatcacccggacggtctccccgattaccccgaagcccaaggcttggccatagaagaactaacagcacaggaggatccagcgggagctcagttggcggaggctctggaaaaaccctgagcatggaaaacattcagagcctgaacgccgcatacgccacaagcgggccaatgtacttatccgatcacgaaaacgtggggagcgagacgcccaagtccactatgacccttggacggtccggaggccgactgccctacggagttcgtatgacagctatgggttcgtcccctaacattgcgagctctggagttgcctctgataccatagccttcggcgagcaccacctgccaccggtgagtatggcctcaacggtccctcattctcttcggcaagccagggataacaccatcatggaccttcagacacagctgaaagaagtgctccgtgagaacgacttgttaaggaaggacgttgaagttaaggaatccaagctgagttcgtcaatgaactccattaagacgttttggagccctgaacttaagaaagagagagccctccgtaaagacgaggcatcaaagataactatctggaaagagcagtatagggtggttcaggaggagaaccaggtggacgcactgagactcaggttggaggaaaaggaaacaatgttaaacaagaagactaagcagattcaggatatggcggaggaaaagggcacgcaggccggagagatccacgacctgaaagacatgctggatgtgaaggaacgcaaggtgaatgtgctgcagaagaagattgaaaacctccaggagcaactgcgcgataaggagaaacagatgtctagtctgaaggagcgcgtcaagagcctgcaggcagatacgacaaatacagacactgctttaacaactcttgaggaggctctggccgagaaagagcgcactatagagagattaaaagaacagagggaccgcgacgaaagggagaagcaggaagaaattgataactataaaaaggacctgaaggatctgaaggaaaaagtgtccctgctgcagggagacctgtcagaaaaagaagcaagccttttggaccttaaagagcatgcatctagcctcgcatcttcggggctgaaaaaggattcccgtttgaagacccttgagattgcactggaacagaagaaggaagaatgcctcaagatggagtcacagctgaagaaggcccatgaggccgctttagaggctcgggcatcacccgaaatgtcagaccggattcagcatctggagagggagattactagatataaggacgagtcatctaaagctcaggccgaggtagaccggcttctagagattctaaaagaggtggaaaacgaaaagaacgataaagacaagaagattgccgagcttgagtctttaaccagcagacaggtaaaggaccagaataagaaggtggccaatctgaagcataaagaacaggttgaaaagaaaaaatccgctcagatgctcgaagaggctcggagaagggaagacaacctgaatgatagttctcagcaactacaagattcactgagaaaaaaagacgacaggatagaagaacttgaagaagccctgcgcgagagtgtgcagatcaccgctgagcgggaaatggtgctcgctcaggaagaatcggcaagaaccaacgcggagaagcaggtagaggagcttctgatggcgatggagaaggtcaagcaggaactagagagcatgaaggcaaaacttagctccacccagcaatccctggccgagaaggagacccacctcactaatttgcgcgctgaacggagaaaacacctggaggaagtgctggaaatgaagcaagaagccttgctggctgcgatttcagagaaggacgccaatatcgctctcctcgagctttcatctagtaaaaagaaaacccaggaggaggtggccgctctgaaacgggaaaaggacagactggtacagcagctgaagcagcagacccagaaccgtatgaaactgatggccgataactacgaagacgaccattttaaatcttctcactccaatcagacgaaccataagcccagccccgaccaggacgaagaagaaggcatatgggcctag

SEQ ID NO: 31562 - DNA, 768 bp, synthetic construct
  source 1..768: mol_type = other DNA; note = Synthetic coding sequence
atggccgcttccactatgtcggtgtgctcctctgcgtgcagcgactcatggcaggttgacgcttgccccgaatcatgctgtgagccgcattgctgtgctctttcctgctgtgctcccgctccttgtcttacactggtgtgcaccccggtctcccgggtcagcagcccttgttgccaggctgcctgcgaaccaagcccatgccagtcaggctgcacttcctcttgcaccccgtcctgctgtcagcagagtagctgtcagcccgcttgctgcactagctccccctgtcagcaagcctgctgtgttccagtgtgttgtaagcccgtgtgttgtctgcctacctgcagtaaggacagttcaagctgctgccagcagagctcttgtcagcccacctgttgcgcaagctcctcttcgcagcagtcttgctgtgttcctgtctgctgcaaaccagtatgttatgttcccacatgctctgaggattcgagctcttgctgtcagcaatcctcttgtcatccagcttgttgtaccagcagcccttgtcagcaagcctgttgtgtgccagtacgatgtaagcctgtttgttgcaagccaatctgttgcgtcccggtatgtagcggcgcaagtacatcatgctgccagcagagctcttgtcagccagcctgctgtaccacgagttgctgtcgcccaagttcaagcgtgtcattactttgccgccctgtttgccgacctgcctgctgctccctctgctctggtcaggaaagctcctgttag

SEQ ID NO: 31563 - DNA, 2562 bp, synthetic construct
  source 1..2562: mol_type = other DNA; note = Synthetic coding sequence
atgtcagagaaggtggattggctgcagtcacagaatggagtctgtaaggtcgacgtgtactctccaggggacaaccaggcccaagattggaagatggacacttccacagaccccgtaagagtcctcagttggctccggagagacctagaaaagtcaacagcagaattccaggacgtgcgattcaagcccggagagtctttcggtggcgagacaagcaattccggtgaccctcataagggcttttcagtggattactataacacaacaaccaagggcacacccgaaaggctacatttcgaaatgacccacaaagaaataccctgtcaaggcccacgggctcaactgggaaacggcagcagtgtggatgaggtgtccttctatgccaaccgtcttaccaatcttgtaatagcaatggctaggaaggaaatcaatgagaagatcgatggatccgaaaacaagtgcgtctatcaaagcctctatatgggcaacgagcctactcctactaagtcgctcagcaaaattgcctccgaactagtaaacgagacggtgagtgcatgcagccgaaacgccgcacctgataaggctcctggatccggcgaccgcgtgagcggctcctctcaatctccacctaatctcaaatacaagtccacactgaagattaaggaaagcacgaaggagcggcagggacctgatgataagccacctagcaagaagagcttcttttacaaggaggtgtttgagtccagaaatggggactatgcgagagagggcggacggttcttccccagagagcgcaagagattccggggacaagaacgtcctgatgacttcaccgcatctgttagcgagggaattatgacttatgcaaacagcgtggtcagtgacatgatggtctctatcatgaaaactctaaaaattcaggtaaaagatacaacaatcgctaccatactcctgaagaaagtgttactcaaacacgcaaaggaagtggtgagcgatttgatcgactccttcctgagaaatctgcatagcgtcaccggcacacttatgaccgatacccagttcgttagtgcagtcaaacgcacagtgtttagtcatggctcccagaaagcaacagacatcatggacgctatgctgagaaaactctataacgttatgttcgctaagaaagtacccgaacatgttcgtaaggcccaggacaaggccgaaagttactctttgatcagcatgaaaggaatgggcgaccctaagaacaggaacgtgaatttcgctatgaaatccgagactaagcttagggagaagatgtactctgagcctaaatcagaggaggaaacttgcgccaagactctgggggagcatatcattaaggaaggccttacgctctggcacaagacccagcaaaaggaatgcaagtccctggggttccagcacgcggcattcgaggcccctaacacacaaaggaagcccgcttctgacatatccttcgagtaccccgaggatattggaaatctgagtctacctccttacccccctgaaaaacccgaaaatttcatgtatgactccgattcatgggctgaagatcttatcgtttcagctttgctgcttattcaataccatcttgctcaggggggacgcagggacgcccgttctttcgtggaagcggctggtaccacgaattttccagcaaacgagcctcctgtcgcccctgacgagagctgcctgaaaagtgcgccaatcgtgggggaccaggaacaagccgaaaagaaggacctgcgttccgtattctttaatttcatccgcaacctactgtcagaaaccatttttaaaagagaccaatctcccgaacctaaagttccggagcagcccgtaaaggaggaccgtaaactttgcgaacgacctctcgcctcctcacctccaaggctatatgaggatgatgagactccgggagccttgtctgggctgacgaagatggccgtttcacagatcgatggccacatgagtggacagatggtcgaacatctcatgaactccgtgatgaaactgtgtgtcattatcgcaaaatcttgtgacgcgagtttggctgagttgggcgatgataaaagcggggatgcgtcgcggttaactagcgccttccctgatagcttgtatgagtgccttcccgctaaaggcacaggttcggcggaggccgtgctgcagaatgcttaccaggcgatacacaatgagatgcgcggaacgtcgggccagccaccagagggatgcgccgctccaacggtcatagttagcaaccacaatctgacagacacagttcagaataaacagctgcaggccgtgttgcaatgggttgccgcatctgaattgaacgttccaatattatactttgctggcgacgatgagggaatccaggaaaagctcctccagttgagcgccgctgcggtggacaaagggtgcagcgtaggagaagttctacagtcagtgctgaggtatgagaaagagcgccagttgaatgaagcagtgggcaacgtcactcccctgcagcttctggactggctgatggtaaacctgtag

SEQ ID NO: 31564 - DNA, 1263 bp, synthetic construct
  source 1..1263: mol_type = other DNA; note = Synthetic coding sequence
atggttcatggtagaaaggcgaatgcccaagtgatggagagcgaggaattcatgctgcttcctgcgaaccaactgatcgatattatctccagtgacgagttgaacgtccgtagcgaggaacaggtgtttaacgcagtaatggcctgggtcaaatattcgatccaagagcgacggcctcagctgcctcaagttctacagcacgtgagactgcccttactctctccaaagttcctcgttgggacggtcgggagtgatccactcattaagagcgatgaggaatgcagggatctcgtagatgaggcaaaaaactaccttctgcttccacaggagagacctcttatgcagggtcccagaactcggccacgcaaaccgatccggtgcggtgaagtcctctttgcagtgggtgggtggtgctcaggtgacgctatcagttccgtggagagatacgatccccagaccaacgaatggaggatggtagccagcatgagtaagaggcggtgtggggttggggtgtccgttcttgacgatctgttgtatgctgtgggcggacatgacggctcttcctatcttaacagtgttgaacgatacgatccaaaaactaaccagtggagctcggatgttgccccaaccagtacctgtcgcacctctgtcggcgtggccgtccttgggggttttctctatgccgtgggagggcaggatggtgtgtcatgcctgaatatcgttgagcgatatgaccccaaagagaataagtggacgcgggtggcgagcatgagcaccaggaggctcggagtcgcagtcgccgtcctagggggattcctctacgctgtgggaggtagtgatggtacctctcccctgaacacggttgaaagatataacccacaggaaaatcgctggcatactatcgcacccatgggaacccggcgtaagcacctgggatgcgcggtttatcaagatatgatatatgcagtgggaggacgggacgacaccaccgaactgagttctgccgagcgatacaatcccaggactaatcaatggtcacccgtggttgccatgacatctcggcgatctggagtggggctggcagtagtgaatggacagctgatggcagttggaggattcgacggaacaacgtacctgaagactatagaggtgtttgatcccgatgccaacacatggagactatatgggggtatgaactataggagacttggaggaggcgtgggggttatcaaaatgacacattgcgagtcgcacatttggtag

SEQ ID NO: 31565 - DNA, 519 bp, synthetic construct
  source 1..519: mol_type = other DNA; note = Synthetic coding sequence
atgtcctgcaccattgagaaggctttagccgacgcgaaagccctcgtcgaacgtctcagggaccacgatgacgctgcagaatctctgatagagcagacaactgccttaaacaagcgggtggaagctatgaagcagtatcaggaagagatccaagagctgaatgaagttgcccgtcaccgtcccaggtctacactggtaatgggaatccagcaggagaataggcagattcgagagctgcagcaggaaaataaggaactccggaccagccttgaggagcatcagtcggccctagaactcatcatgtccaagtacagagagcaaatgtttcggttgctgatggcaagcaagaaagacgaccctgggataattatgaaattgaaagaacagcacagtaaaatcgacatggttcacaggaataagtctgagggattttttctagacgctagtaggcatatcctggaagccccacaacatggcctagagagacgccaccttgaggcaaatcagaatgtgcactag

SEQ ID NO: 31566 - DNA, 813 bp, synthetic construct
  source 1..813: mol_type = other DNA; note = Synthetic coding sequence
atgctgtttatatttcccctatcccttccctggcgaccatcttgctggaaggagagctgttcgaccgggcaacgtcaggccggacgatcccgcgaagacagcgttaccccgccacccagcagcccctggcccactcctccagccggtgccatgtctacgaagcaggaagcccgtcgcgatgagggcgaggcaaggacccgtggacaggaggctcagctgcgcgatagagctcacctgtcactacataaggactcagcggatctgctgccactggatagtctcaaacgcttgggaaccagtaaggacttacagccccgaagtgttattcagagacgcctggtcgaggggaacccaaactggctccaaggcgagccccctcgcatgcaggatctgatacatggccaggagagcagaaggaagacatctcggaccgagatccccgctctgttagtaaattgcaagtgtcaggaccaacttttaagggtggccgtagacactggcacgcagtataatcgtatctccgccggatgtctaagccgcttgggcttggagaaaagagttctgaaggctagcgccggtgacttagccccaggccctcctacacaggtggagcagttggagcttcagctaggccaagaaaccgtagtctgctccgcccaggtggtggatgcagagtcccccgagttttgtctgggcctacaaacactcctctccttaaaatgttgcatcgacctggaacatggggttctcaggctcaaggcacccttctcagagttgccctttctgcctctgtaccaggagcctggccaatag

SEQ ID NO: 31567 - DNA, 243 bp, synthetic construct
  source 1..243: mol_type = other DNA; note = Synthetic coding sequence
acctcttgttgtcgccctagcagctccgtgagcctgctctgccacccagtctgtagctgttcccctgcttgtcagcccacttgctgcatccattccccatgccaagcgtcctgttatgtgcctgtgagctgccaacccattatctatgtcactccttcatgtcagagctccgggtgctgccagcccccttgcactacggccttgtgcaggccaatctcctgcagcaccccatcttgctgctag

SEQ ID NO: 31568 - DNA, 2013 bp, synthetic construct
  source 1..2013: mol_type = other DNA; note = Synthetic coding sequence
atggcccttggggaagaaaaagcggaggccgaggccagtgaggatacaaaggcacagagctacggaagaggatcttgcagagagagggaactggatatacccggacctatgtcaggcgagcagccacccagattggaagccgaaggaggcctgatatcccccgtctggggcgctgagggtatccctgcgcctacctgttggatcggaacagacccgggaggcccttccagggcacatcaaccccaagcctctgatgccaatcgggagcccgtggccgaaaggagtgaaccagccctttctgggctgcctcccgctacaatgggcagcggagatcttctgttgtctggtgagagccaggtcgaaaagacaaaattatccagctctgaggaattccctcagactctaagtctaccaagaaccacgacgatatgcagtggacacgacgcggatacagaggacgatccctccctggccgacctgccgcaggcccttgacctgagtcaacaaccgcacagttcaggtctgagctgtctctcccaatggaaaagtgttctgagccccggatcagccgctcagcccagcagttgcagcatttctgctagctcaaccggcagtagcctccagggtcatcaagaacgagctgagccccgaggagggagcctggccaaagtcagctcgagcctggagccagtggtaccacaggagccttcgtcggtcgtgggtctggggccacgacctcagtggagtccacagccagtcttttccggtggagacgcttctggactggggcgacgaaggctgtcctttcaggccgagtattgggcctgcgtattacccgactcactgcccccttctcctgatcgccatagccccttgtggaacccaaacaaagaatatgaagacttgctcgattacacatatccactgaggcctggtccgcaactacccaaacacctggattcccgagtccctgccgaccccgtgctgcaggacagtggggtggatctggattcatttagtgtatcccctgcatcaaccctgaaatcacctaccaatgtctctccaaattgccctccagctgaagccaccgctttgccctttagtggcccacgggagccctcgctgaagcaatggccctctagagtgccgcagaaacaggggggtatgggcctggcctcctggtcacagcttgctagcactcctcgggcaccaggatccagggatgccaggtgggagaggcgcgagcccgcactaaggggcgctaaggacaggctaacaatcggtaaacatttggatatgggttctcctcagctgcggactcgcgataggggctggccatccccaagacccgaaagagagaagaggactagtcagagtgctcgcaggcccacttgcacggagtcgaggtggaagtcagaggaggaggtggagagtgatgacgaatatctggctctcccagcacgcctcactcaggtgtcctcacttgtctcctatctcggttctatcagcaccctggtcacactgcctaccggggacataaagggccagagtcccctggaggtatcagactcggacggaccagccagctttccatctagcagctcacaatctcagcttcctcccggtgcagcactgcagggcagtggagaccccgaaggacagaacccttgtttccttcgctcatttgtgcgtgctcatgatagcgcaggagaaggctcactgggttcctcgcaggccctcggagtgagcagcgggctcctcaaaacacgcccaagtctgccagcacgcttagatcgatggcctttctccgaccccgatgttgagggtcagctcccgaggaaaggcggagagcagggcaaagaaagccttgtgcagtgcgtcaagactttctgctgccaactggaagaacttatctgttggctctataatgtggctgacgtgactgaccacgggacggctgcacgttccaatctgacatcactgaaatctagtcttcagctgtatcgattttag

SEQ ID NO: 31569 - DNA, 702 bp, synthetic construct
  source 1..702: mol_type = other DNA; note = Synthetic coding sequence
atgaaacagttgatcgaagacactgagaagaacaaagtctacgtggctatggttactgactacggggcttttataaagatccccggatgccgaaagcaaggccttgtgcatcgtacccacatgagttcctgccgagtcgataagccctctgaaattgtagatgtgggagataaagtgtgggtgaaattgattggtagggagatgaaaaacgacaggataaaggtttctttatctatgaaggtcgtcaaccagggcactggaaaggacctggacccgaacaacgtaattattgagcaagaggagcggcgaaggagatccttccaggactatacgggccaaaaaatcacactggaggctgtactgaataccacttgtaaaaagtgcggctgcaagggacactttgcaaaagattgtttcatgcaacctggaggcactaaatattccctaattcctgatgaggaggaagaaaaagaggaggcaaaaagcgccgagttcgagaagcctgatccaacacggaatccctcaagaaaaaggaagaaagaaaaaaagaaaaagaaacatagagaccgtaagtcgtccgactctgacagttctgacagcgaatctgatacagggaaacgggcaagacacaccagcaaggatagcaaggccgcaaaaaaaaagaagaagaaaaagaagcacaaaaaaaagcacaaagagtag

SEQ ID NO: 31570 - DNA, 492 bp, synthetic construct
  source 1..492: mol_type = other DNA; note = Synthetic coding sequence
atgggatggcgtctgcttacacaagatgaaggtcccgcactcgtccccggagggaggctcggggacctgtgggactatcatcagcaccggtacttgcagggtgtgcctgaaggggttcgcgatttgccacccggagtggccctcccgctcgaatcaaacctggcctttatgaacggagttagctttacgaagggctgttacattggacaagaactcactgcacggactcaccatatgggggttattcggaagcggctgttccctgtgcggttcctcgatccactgcctacgagtgggatcacccctggcgcaactgtgctgactgcaagtggccaaaccgtggggaaatttcgggcaggacaggggaacgtaggcctggccctactctggtctgagaagataaagggacccctgcatatacgcgctagcgaaggagcacaggtggccctcgccgcatccgtgcctgattggtggcccacagtctctaaatag

SEQ ID NO: 31571 - DNA, 804 bp, synthetic construct
  source 1..804: mol_type = other DNA; note = Synthetic coding sequence
atggccatggagatgcgcctgcccgtcgcacggaagcccctgtccgagcgcctgggccgtgacaccaagaagcacctcgtagttcccggtgataccatcactactgatactgggttcatgagaggtcatggtacctacatgggcgaggaaaagttaattgcatccgtggcaggcagtgtcgagcgggtgaacaagctcatctgtgttaaagcacttaaaactagatatatcggggaagtgggggatattgtggtcgggagaatcactgaggtgcaacagaaaaggtggaaagtggagactaatagcaggctcgactctgtactgctcctgtcgagtatgaacctgcccggaggcgaactgaggcgccgttcagccgaagacgagctggcgatgagaggattcctccaagaaggcgacctaatcagcggcgttcttgtgcaggtgagcccatcgctggtaaagcgtcaaaaaacacacttccatgatctaccatgtggcgctagcgtcatacttggaaacaatgggttcatatggatctaccctacccccgagcataaagaggaagaggcgggaggctttattgctaatctggaacccgtatccttggcggatcgcgaggtcatcagtcgtcttcggaactgcataatctctcttgttactcagcgaatgatgctgtacgacacatcaattctgtattgttatgaggcctccctgccgcaccagatcaaagacatcctcaagcccgagatcatggaggagattgtgatggaaacacgacagcgtctgctggagcaggaagggtag

SEQ ID NO: 31572 - DNA, 3111 bp, synthetic construct
  source 1..3111: mol_type = other DNA; note = Synthetic coding sequence
atgcccgtcttcaaagaggtgaaggtgcacctcttggaagatgccggaattgaaaaggacgcggtgactcaggaaacacggatcagcccctccggcatagactccgcgacgaccgttgcagccgctacagcggcagcaatcgccacggctgctcctctgataaaggtgcagtcggatctggaggccaaggtcaattcagttaccgagctgctttctaaacttcaggagacagataagcacctgcagcgagttactgagcagcagacgtccattcaaaggaagcaggaaaaactccattgtcacgaccacgaaaagcagatgaatgtgttcatggagcagcacattaggcacttagagaagttacagcagcagcaaatagacattcagacacacttcataagtgcggctctgaagacatcctcttttcagccagtatcaatgcctagctcccgggcagttgagaagtacagtgtgaagccagagcatccgaatctggggtcctgcaatccctcactgtataatacattcgcgagcaagcaggccccactgaaggaagtggaggacacctcattcgacaagcagaagagtccacttgaaacccccgctcctagaagatttgctcctgttcctgtgtctagggacgacgagctgagtaaaagggagaatcttctggaagagaaggagaatatggaggtgtcgtgtcacaggggtaacgttcggctgctggagcagatcctgaataataatgatagtttaactagaaagtccgaatcaagtaataccacgtctttgacacgctcaaaaatcgggtggacccctgagaagacgaataggtttcccagctgcgaggagctcgagactaccaaagtgacaatgcagaagtccgatgacgttctgcacgatcttggtcagaaagaaaaagaaactaattcaatggttcagccaaaagagtctctgtctatgctcaaacttcccgatctgcctcaaaactcagtgaagcttcaaaccactaacacaacccgctcggttctaaaagacgctgaaaagatccttcgcggagttcagaacaataagaaggttctagaggaaaaccttgaagccatcatccgggcaaaggatggggctgccatgtattccctgatcaatgccctttctacgaacagggagatgagcgagaaaataaggatcaggaaaaccgttgacgagtggattaagacgataagcgctgagatacaggatgagctctctcggaccgactatgaacaaaagagattcgaccagaaaaatcagaggaccaaaaagggacaaaatatgactaaagatattcggacgaatacacaggacaaaactgtaaataagagtgtgattccacgcaagcacagccaaaagcagatcgaagagcacttccgaaacctgcccatgaggggcatgcccgcaagctctctgcagaaagaacgcaaagaaggcctgctcaaagccacaacggtcatccaggacgaagactacatgctgcaggtttatggaaaaccagtttatcagggccatcgcagtactctaaaaaaagggccatacctgaggttcaactctccctcccctaaaagcagaccccagcggcctaaggtgatcgaacgagtgaagggcaccaaggtcaagtcgattcgaacccagactgacttctatgccaccaagccgaagaagatggattccaagatgaaacacagcgtgccagttctaccacatggtgatcagcaatatctcttctccccatcccgagagatgccaactttttctggcacacttgaaggacacctgattcccatggcaatcttgttggggcagacacaaagtaattctgatacgatgccgccagcaggggtgatcgtgagtaagcctcatcctgtgaccgttacaacttctatccccccatcttccagaaaggtcgagactggcgtgaagaaacctaatatcgccatcgttgaaatgaaatcagagaagaaagatcctccccaattaacagtgcaggtactgccgtctgtagacattgactcaatctctaactcgtccgccgatgtcctgagcccactgtcgtctcctaaggaggccagtctgccacccgtgcagacgtggatcaaaacgcctgagataatgaaggtggacgaagaagaggtgaagtttcctggcaccaacttcgatgaaatcattgacgtgatacaggaagaggagaaatgtgacgaaattcccgactccgagcccattctagagtttaatcgatctgtgaaggccgactcaacgaagtacaatgggcctccttttccgcctgtggcctcaacttttcagcctaccgcagatatcctggacaaggttatcgaaagaaaggagacacttgaaaacagcctgatacagtgggtggagcaggaaattatgtccaggattatctcaggtctgttccccgtgcagcaacagatcgcgcctagtatcagcgtgtccgtgagcgagacatccgaaccacttacctcagatattgtagagggaacgtcttcaggtgccttgcaactcttcgtggatgcaggtgtgccagtgaatagcaacgtcatcaagcacttcgtgaacgaggcattagccgaaacaatcgccgtgatgcttggcgacagggaggcaaaaaagcaagggcctgttgccaccggagtaagcggcgacgcctctacaaacgaaacgtacctccctgcacgagtgtgcacaccactccccacgccccagcctactcccccttgcagccccagttctcccgcaaaggaatgcgttcttgtgaaaaccccagatagttcaccgtgcgactccgaccatgacatggcatttcccgttaaagaaatttgtgcagagaagggagatgatatgcctgcaattatgctggtgaacactcctacagtgactccgaccaccacaccccctcccgcagctgccgtgtttactccaacattaagtgatatctccattgacaagctaaaggtttcatcacctgaactgcccaagccatggggtgatggtgacttaccccttgaggaagaaaatccaaactcccctcaagaagagttacaccccagagctatgtag

SEQ ID NO: 31573 - DNA, 3351 bp, synthetic construct
  source 1..3351: mol_type = other DNA; note = Synthetic coding sequence
atgtatggttcagccagaagtgtcggaaaggtggagccttcatcgcaaagccccggacgctccccaaggctgcctcggtctcctcgcttaggacaccgcagaaccaattccacagggggatcctcaggcagctcagttggcggaggcagtgggaagactctgtctatggagaacatccagagccttaacgcagcttatgccacatcgggcccaatgtacctctctgatcacgaaaatgtcggaagtgagactcccaagagcaccatgaccctggggcgatccggcggtcggctcccatacggagtccggatgactgccatgggaagttcgcccaacattgccagctcaggggtggctagtgacacgattgcatttggcgagcaccatttgcccccagtttccatggcgagcacagtcccccatagcctgcggcaggcaagggacaatacaatcatggatctacaaacccagctcaaggaagtgctaagggagaacgaccttctaagaaaagacgtggaggtgaaggaatcaaaactctctagctcaatgaactcgattaaaaccttctggtctcctgaattgaagaaggagcgggctctgagaaaagacgaagcaagcaaaatcacaatttggaaggaacagtaccgggtggtgcaagaggaaaaccaacacatgcagatgaccatccaagcactccaagacgagctgcggatccagagggatctcaaccagctctttcagcaggactcgagctcccggacgggtgagccttgcgtcgccgagctgactgaagagaacttccagaggctacacgctgaacatgaaaggcaggccaaggagctgtttcttttaaggaaaactctggaggagatggaactgagaattgagacacaaaaacagacactgaacgctcgggatgaatccattaagaaactgctggagatgctgcagagtaagggactcagcgctaaagcgaccgaggaggatcacgagcgcactagaaggctggctgaagccgagatgcacgtgcaccacttggaatccctgttagaacagaaggaaaaggagaatagcatgctaagggaagaaatgcatcgtagatttgagaacgctccggacagcgccaaaactaaggccctacagacagtaatcgagatgaaggacagcaaaataagcagtatggagcgaggcttgagagatctagaagaggaaatccagatgcttaagtccaacggtgcactgtctactgaggagcgggaggaagagatgaagcagatggaggtgtatcgtagccattcaaaattcatgaagaataaggtcgagcagctgaaggaggaactgagcagcaaggaagcccagtgggaggagctaaagaagaaggccgctggcctgcaggcggaaatcgggcaagttaaacaggaactgtccaggaaagataccgaattactggcgctgcaaaccaagctggaaaccctcactaaccagttttcagattccaaacagcacatcgaggtcctaaaggagagtttaaccgctaaggaacagagagctgccatactgcagacggaggtggatgctctgagacttagactcgaggagaaagagaccatgctgaataaaaagaccaaacagatccaggacatggcagaggagaaaggtacccaggccggagagatccatgatctgaaggatatgctggatgtgaaagagcggaaagtgaacgtgcttcagaagaagatcgagaatctgcaagaacagcttcgcgacaaggaaaaacaaatgtcatcactgaaagagcgtgtaaaaagtctccaagcggatactacaaacacagatacagctttaactacactggaagaagcactggccgaaaaggagcggactatcgaacgattgaaagaacagcgcgatcgggatgagcgagaaaaacaggaagagatcgataattataagaaagatcttaaggacctgaaggagaaggtgtcgctcctccaaggcgatctgagcgaaaaggaagccagcttgctggacctgaaggagcatgcttcctcgctggctagctctggacttaaaaaagatagcaggttaaagactttggaaatagcgttagagcagaaaaaagaggagtgtctaaagatggaaagtcaactgaagaaggctcacgaagccgctctcgaggcaagggctagcccggaaatgtcagaccggatccagcacttagagcgggagatcactaggtacaaggacgagagttccaaggctcaggcagaagtcgaccgacttctcgaaatactaaaggaagtggagaatgaaaagaacgacaaagataagaaaattgcagagctcgagaggcaggtcaaggatcaaaacaagaaagtggcgaatctcaaacacaaagaacaagttgagaaaaagaaaagcgctcagatgctggaagaggcacgccgaagggaggacaatctcaatgacagctcacaacagctccaggacagcctgagaaagaaagacgacaggatagaggagctcgaggaggctctgagagaatccgtgcaaatcaccgccgagcgtgagatggttctcgcacaggaggaaagtgccaggacaaatgccgaaaagcaggttgaggaactattgatggccatggagaaagttaagcaggagctggaatctatgaaggctaaattgagctcaacccaacagagcctcgccgagaaggagacccatctgaccaatcttcgagcggaaaggcgcaagcatctggaagaagtcttggagatgaagcaagaggccctactggccgcaatttctgagaaggacgccaacattgcgttgctggagctctctagttctaaaaagaaaacacaggaagaggtcgccgctcttaaacgcgagaaagatagactggtgcaacagctgaagcagcagacgcagaatagaatgaagctgatggcggacaactatgaagacgatcactttaagagctcccacagcaatcaaaccaaccacaaaccgtcccccgaccagattatccagccactcttagagctggatcagaataggagcaaattgaagctgtacatcggacatctgacgaccttgtgccacgacagagaccctctcattttgaggggactcactccacctgcttcttacaatcttgacgacgatcaggccgcatgggaaaatgagctgcagaagatgaccagaggacagttgcaggacgaacttgaaaaaggcgagcgggataacgcggagttacaggagttcgctaacgccatcctacagcagatcgcagatcattgtccagacatcctggagcaggtggtgaatgccctggaggagtctagctag

SEQ ID NO: 31574 - DNA, 816 bp, synthetic construct
  source 1..816: mol_type = other DNA; note = Synthetic coding sequence
atgagacaactgcatcctgaagccattgcagcaattcagtcaaaggctctattcagcaaagcggaggaacaactgctatctaaggtgggctcaacgtcgcagcccacccttgagacgttccaagatctactacaccgccacccagacgctttctacctcgcacgaaccgccaaagccctgcaggcgcactggcaactgatgaaacagtactatctactggaggaccaaactgtgcaacccctgccgaagggtgaccaggtcctcaactttagtgacgcagaggatttaatcgatgattccaaattaaaagatatgagagacgaagttctggaacatgagctgatggtcgcggaccggaggcagaaacgtgaaattaggcagctggagcaggaattgcacaagtggcaggtgctggtggattccataacaggtatgtcgtccccggacttcgacaaccagactttagcagtgctgcgtggacggatggtgcgatatctaatgcggtcccgagagattaccttaggccgagcgactaaagataatcagatagacgtcgatttatcattggaagggccagcgtggaaaatcagtcggaagcagggagtgattaaattgaaaaacaatggggatttcttcattgctaacgaggggcgtaggcccatttatatagatgggaggccagttctgtgcggatcgaagtggaggttatctaacaattctgtggtggaaattgcctctctccgttttgtgttccttattaatcaggatctaatcgctctgatccgggcagaagctgctaaaataactccccaatag

SEQ ID NO: 31575 - DNA, 2751 bp, synthetic construct
  source 1..2751: mol_type = other DNA; note = Synthetic coding sequence
atggagatgcctctacctcctgatgatcaggagcttcgcaatgtgatcgacaagttagctcagttcgtcgcccgaaacggaccagagttcgagaaaatgacaatggagaagcagaaggataatccaaagttcagtttccttttcggaggtgaattctactcgtactacaaatgcaagttagctttggaacagcagcagctaatctgcaagcaacaaacccccgagctggaacccgcagctactatgccgccactgccgcaaccacccctggcacccgctgcccctattcctccggctcaaggcgcaccctcaatggacgaattgatccagcagtcccagtggaacctccagcagcaagaacagcacctgctcgctctgagacaagagcaagttaccgctgcagtcgcccacgctgtggaacagcagatgcaaaaactgctggaagaaacgcagctggatatgaacgagttcgacaacttgctgcagcccataatcgatacatgcacaaaggacgccatatcagcagggaaaaattggatgtttagcaatgccaaaagtccccctcattgcgagctgatggccggtcatttacgaaaccgcatcactgctgatggagcacattttgaattgaggttacacctgatatatctgatcaacgacgtcctgcaccactgtcagcggaagcaagccagggaattactggccgctctccagaaggttgtggtgccaatctactgtacatcattcctcgcagttgaagaggacaaacagcagaagattgcgcgtctcctccagctgtgggagaagaatggctactttgatgactcgattattcaacagttacagtcacccgctcttggactgggccagtaccaggctacgcttattaacgaatattcatccgtggtccaacctgtgcagctggcattccagcaacagattcagaccttaaagactcagcatgaagagtttgttaccagtttggctcaacaacagcagcagcagcaacagcagcaacagcaactccagatgccccaaatggaagccgaggtgaaggccaccccgcctcctccagccccacccccagctccagcgcctgcccctgcgattccacccacaacccagccggatgactcgaaaccaccaattcagatgcctggctcgtcagaatacgaagcgccaggcggagtccaggatccagccgctgcaggccctaggggtccaggaccacatgatcagattcctcctaataaacctccctggtttgatcaacctcaccctgtggctccttgggggcaacaacagcctccagagcagcctccctacccgcaccaccaaggagggcctccccactgtcccccatggaataacagccacgaaggcatgtggggcgagcagagaggagaccctggctggaacgggcaaagagatgcaccctggaataatcagcccgatgcagcttggaactcccagttcgaaggaccttggaacagtcagcatgaacagccgccatggggtggtggacaacgcgagcctcctttccgcatgcaacgtccccctcacttccggggacctttccctcctcaccagcagcatccccaattcaatcagccaccccatcctcacaacttcaacagattccctccacgctttatgcaggatgatttcccccctagacacccctttgagcgacctccttacccccatagattcgactacccacagggggacttccccgcagaaatggggccaccacaccatcaccccggacacaggatgccccaccccggtattaacgagcatccaccatgggcaggaccccagcatccagattttggtccaccgcctcacggatttaacgggcagccccctcatatgcggcgtcagggacccccacacatcaatcatgatgacccaagcctcgtgcccaatgtcccctactttgaccttccagctggcctgatggcacccctcgtgaaattagaggaccatgagtacaaaccactggatcctaaagatatcagacttccacccccaatgcccccttccgagagactcctcgctgcagtcgaagccttttactcacccccatcgcacgaccgtcccaggaacagtgagggctgggaacaaaatggtttgtacgaattcttccgggctaagatgcgcgctcggaggcggaagggccaggaaaagcgtaacagcggaccctcacgatcacgttcccgcagcaagtcacgaggtaggtcttctagtaggtctaatagtaggtcatctaaatcctcggggagttattccaggtcacgctctcgcagctgttccaggtcctattcccggagcaggagcaggagtcgcagcagaagccggagctcccgaagccggagtcgctctcagtctcggtcccggagcaaaagctacagtcccggacggcgtaggcgatctcggtctagatcacccacacccccaagttcggccggacttggaagcaattcagcaccacccattccagacagccgccttggagaggagaacaaggggcaccagatgctcgtgaagatggggtggagcgggtccggtggactcggagcgaaggagcagggtattcaggaccccataaagggtggggatgtcagggataaatgggaccaatataagggcgtgggggtcgctctggacgacccatacgaaaactataggaggaacaagagttactcatttatagcccgaatgaaagctagggacgaatgtaaatag

SEQ ID NO: 31576 - DNA, 963 bp, synthetic construct
  source 1..963: mol_type = other DNA; note = Synthetic coding sequence
atgagcaagagcgagtcaccaaaggagccagaacagctccgaaagctctttattggtgggctatctttcgaaaccaccgatgaaagtctgagatctcacttcgagcagtggggcacgcttacagattgcgtagtcatgagagaccctaacaccaagaggagcagaggttttgggttcgtgacgtatgccacagtggaggaggtcgacgctgccatgaacgctcgaccgcacaaggtggacggacgggtggtggagcctaagcgggcagtttccagggaggactcgcaaagacctggcgctcatctcaccgtaaagaagatctttgtggggggaattaaggaggacaccgaggagcatcacctgagagattatttcgagcagtatgggaaaatcgaagtgattgagatcatgacagaccgagggagtggcaagaaacgcggattcgcatttgttactttcgacgaccatgattccgtggacaagattgtgatacagaaataccataccgttaatggtcacaattgtgaagtgcggaaggccctttctaagcaggaaatggcatcggccagctcctcccagagaggacgcagcggctcaggaaattttgggggaggtcgaggaggcggattcggcggtaacgataacttcgggcgtggcggtaatttctccggacggggaggtttcggcggatcccgcggagggggaggctacggaggcagcggcgatggttataatggatttggcaacgacggctccaatttcggcggtggaggaagctataacgactttggcaactacaataaccagtccagtaactttggtcctatgaaggggggaaattttggcggacgcagttcagggccatacggagggggagggcaatattttgctaaacctaggaaccagggtgggtatggtgggagtagcagcagtagctcctatggctcagggcgacggttctag

SEQ ID NO: 31577 - DNA, 735 bp, synthetic construct
  source 1..735: mol_type = other DNA; note = Synthetic coding sequence
atggaactgaccatattcatactgagacttgctatctacattctgaccttccccttgtatctgctgaatttccttggattgtggtcatggatatgcaagaagtggtttccgtatttcctcgtccggtttactgtcatttacaatgaacagatggcaagcaaaaaacgcgaattattttctaatctgcaggaattcgcaggtccatcgggcaaattatctctgttggaggtgggctgtggaaccggagccaatttcaagttttacccccctggatgtagagtcacctgtatcgacccaaaccccaatttcgagaagttcctgataaaaagcattgccgaaaatagacatctccagtttgaaaggttcgttgtcgcagctggagagaacatgcatcaggtagctgatgggtctgtggacgtcgtcgtgtgcaccctggttctgtgcagcgtgaaaaaccaggagcgaatcctgagagaagtctgtcgtgttctacgcccagggggtgccttctattttatggagcacgttgcggcagagtgcagcacgtggaattacttctggcagcaagtgctggaccctgcctggcatcttttatttgatggctgcaatctgaccagagagagttggaaggccctggagcgggctagcttttctaagctgaagttacagcacatccaagcacccctgagctgggaactggtgaggccacacatctacgggtacgctgtgaagtag

SEQ ID NO: 31578 - DNA, 4125 bp, synthetic construct
  source 1..4125: mol_type = other DNA; note = Synthetic coding sequence
atgacatctgccgctgaaataaagaaacccccagtggctccaaaacctaagtttgttgttgctaacaacaaacccgcacccccacccattgcccctaagcccgatatcgtcatctcttccgtgccccaatccacaaagaaaatgaagcccgcaatcgcccctaaaccaaaagtcctaaagacctctcctgtgagggagattggtcagtcaccttctaggaagataatgttaaacttggagggtcataagcaggaactagccgaaagcactgacaactttaactgcaaatacgaagggaaccagtcgaacgactatattagtccaatgtgcagctgtagctctgagtgtatacacaagctcggccatcgggaaaatctctgtgttaaacaactcgtcctggaacccctcgagatgaatgagaacctcgagaatagcaaaatcgacgagacgctgacgattaagactaggtccaaatgcgacctatatggcgagaaagctaaaaatcaagggggagtggtcttgaaagctagtgtgctggaggaagagttgaaggacgccctgatccaccagatgcccccattcatttcagctcaaaagcaccgcccaaccgactcgcctgaaatgaacgggggatgtaattcaaatggacagtttaggatcgagttcgcggatctatctcctagcccttcctcctttgaaaaagtccctgaccaccatagttgtcacctgcaactgcctagcgacgaatgtgaacatttcgagacttgccaggatgattccgagaagtctaacaattgtttccagtcatcagaattagaagccttagagaatggtaagaggagtacactcatctctagtgatggtgtgtccaaaaagtcagaggtgaaggatcttgggccactggaaatccacttggtgccatatacgcccaagtttccaacacccaagcctcgaaaaacccgtacggcccgtctccttcgtcaaaagtgcgtggatacaccctctgaaagcacggaggaacctgggaacagtgacagttcctcgtcttgcttaacagagaactcccttaaaattaacaaaatctccgttctccaccagaatgttctttgcaagcaggaacaagtggacaagatgaaattaggcaataagtctgaactcaacatggagagcaactccgatgcccaagacctcgttaactcccagaaggcaatgtgtaatgaaacaacgtcttttgaaaagatggctccatctttcgataaggactcgaacctctcttcggattctaccacagttgacgggagctctatgtccttggctgttgacgagggcacgggatttattaggtgtacagtgtcaatgtctctgccgaagcaactaaaattgacctgtaatgagcacctgcagtcaggtagaaatttaggcgtgtccgccccacagatgcagaaggagtcggtgataaaagaggagaactcactgcggattgtgccaaaaaagccacagaggcactccctgccagctactggggtgctgaagaaagccgcttcagaggaacttttggaaaagtcatcttatccaagttctgaagaaaagagctcagagaagtcactggaacggaatcacctacagcatctttgcgcccagaatcgaggagtgagcagttcattcgacatgccgaaaagagctagcgagaaacctgtgtggaagcttccgcacccaatactgccattctctggtaatccagagtttctgaagtcagtcacagtatcctcaaattccgaaccgagtaccgctctgactaagcctcgcgctaaatcactgtctgctatggacgtggagaagtgtactaagccttgcaaagacagcactaaaaaaaactcattcaaaaagctgctgtcaatgaaattgtcaatctgtttcatgaagagcgactttcagaaattttggagcaagtctagccaacttggggatacaaccacggggcacctgtccagtggagaacaaaagggaatcgaaagcgattggcagggcctgctcgttggagaagagaagcgttcaaaaccgattaaggcttactccactgagaattattctcttgaaagtcagaagaaacggaagaagagtagaggacagacctccgcggcaaacgggcttagagctgaatctttggacgatcaaatgctctcccgtgagtcctcttcccaggctccatacaagagcgtgacgtcattgtgtgcacccgaatatgaaaatatcagacattacgaggagattcctgaatacgaaaatttgccttttattatggctattaggaagacccaggaactggaatggcaaaattcgagcagcatggaggacgccgacgccaatgtttatgaagtggaagagccttacgaagctccagacggacagctgcaacttgggcctagacaccagcatagtagtagtggagccagccaggaagaacagaacgatctgggcctgggcgaccttccttctgacgaggaagagatcattaacagcagtgacgaagatgacgtctcatccgagtcctccaaaggggaacctgatccactcgaggataagcaggatgaggacaatgggatgaaatccaaggtccaccatatcgcaaaagagattatgagttccgagaaagtgtttgtggacgtgctgaaactgctgcacatagacttcagagacgccgttgcacacgcgtcccggcagcttggtaagccagtgatagaagatcgtattctgaaccaaatcctgtattatttgcctcagttatacgaactgaatagggatcttcttaaagagttagaagagaggatgctgcattggaccgaacagcagagaatcgctgatattttcgtaaagaaagggccatatctgaaaatgtactccacttacatcaaagaatttgataagaacattgctttgctggacgagcagtgtaagaagaaccccggatttgccgctgtggttcgggaattcgagatgtctccaagatgcgccaatctcgcactgaaacactacttattgaaacccgtacagaggatcccgcagtaccgcctccttctgacggactatttaaagaaccttatagaggacgctggagactaccgtgatactcaggacgcacttgccgtggttatcgaggtagcaaaccacgcgaacgacaccatgaagcaaggtgacaatttccaaaagctcatgcaaattcagtatagccttaacggacaccacgagatagttcagccagggagggtgtttttgaaggaggggatcctaatgaagttatcaagaaaggtgatgcagcctcgcatgtttttcctgtttaacgacgctcttctgtacaccacaccagtgcagagcggaatgtataagctcaacaacatgcttagcctcgcagggatgaaagtgagaaagccaactcaagaggcctatcaaaacgagcttaaaatagaatcggtagaacggtcgttcatattgagtgcctcgtctgcaactgagagagatgagtggctagaagctattagtcgggctatcgaggagtacgctaagaaacgtataacgttctgtccttctcgctccctggatgaggctgattcagagaacaaggaagaggtgtcccctctcggcagcaaagccccaatctggattcctgacaccagagccactatgtgtatgatttgtacaagtgaatttaccctcacatggcgacgccatcactgccgagcgtgtggtaagatcgtgtgtcaggcctgctccagcaacaagtacgggctcgattatttaaaaaatcagcccgctcgggtttgcgagcactgctttcaagagcttcagaagctcgatcatcagcatagtcccagaattggctccccaggaaatcacaaatccccttcatctgccctctccagcgtgcttcatagtatcccatctggcagaaaacagaaaaagatccctgctgcacttaaagaggtgagtgctaacactgaggattcctccatgtctggctatctctacagatccaaaggcaataaaaaaccctggaagcatttttggtttgtgattaagaataaagtgttgtatacatacgccgcatcagaggtcaggtcagagatttag

SEQ ID NO: 31579 - DNA, 1446 bp, synthetic construct
  source 1..1446: mol_type = other DNA; note = Synthetic coding sequence
atggcaagtgcagcctcagttacatctttggcagacgaggtcaattgtcccatctgtcagggcactctcagggaacccgttacaatcgactgtggccacaacttctgccgcgcatgtctcacaaggtactgtgagataccgggtccagacctggaggagagcccaacttgccctctgtgtaaagaaccctttcggccagggtcctttagaccaaactggcagctggccaacgtagtggaaaacatcgagaggctccagctggtgagcaccctgggcttgggcgaggaagacgtctgtcaggagcacggcgagaagatttattttttctgtgaggatgatgaaatgcagctgtgcgttgtatgccgtgaggccggagagcatgctacccacaccatgcgattcctggaggatgccgcagcgccataccgggagcagatccacaagtgcctcaagtgtttgaggaaagagagagaggaaatccaggagattcagagtagagagaataaaagaatgcaggtccttttaacccaggtgagtaccaagcgacagcaggtgatttcagagttcgcccatctccggaagtttttggaggaacagcagagtatcctgttggcacagctggaaagccaggatggtgacattctgcggcagcgcgacgaatttgatctcctcgtagccggtgaaatttgtagatttagtgcacttattgaagagctggaggaaaagaatgaacgcccagccagagaacttcttactgatattcgatctacgctgatcaggtgtgaaactcggaaatgcaggaagcctgtcgctgtgtcacccgaattagggcagagaatccgggatttcccgcagcaggccctacccttgcagagggagatgaaaatgttcttagaaaacctgcctaaccatttggtgatccctaccgcccatatcagtctggacccacagacaagtcatccgaagcttttgctctcagaagaccatcagagggcacagttctcatataagtggcagaattccccagacaacccccagaggttcgacagggcgacctgtgttctcgcccacaccgggatcacaggcggacggcacacctgggtggtgagcattgacctagctcatgggggaagctgcaccgtaggagtagttagcgaagacgtgcagaggaaaggcgagcttcgtctgcgaccggaagagggggtctgggcggtgcggttggcttgggggtttgttagcgctctgggatcctttcctacacggctgacactgaaggagcaaccaagacaggtccgcgtgagcttagactatgaggtaggctgggtgacttttacgaatgccgttacaagagagccaatttataccttcaccgctagttttactcgcaaagttattccattcttcggcctctgggggaggggaagctctttctcactgtcgtcttag

SEQ ID NO: 31580 - DNA, 468 bp, synthetic construct
  source 1..468: mol_type = other DNA; note = Synthetic coding sequence
atggacactatgatgctcaatgtgaggaatctatttgagcaattggtccgacgagtggagattctgtcagaaggaaacgaggttcagtttattcagcttgcaaaagacttcgaagacttccgtaagaagtggcagcggaccgatcacgagctcggcaaatataaggacctgctgatgaaagcagagacggaaaggagcgctctggacgtcaaactgaagcatgccaggaatcaggtggacgtggaaatcaagcgccgtcaaagagccgaagcagactgcgaaaagctggaaaggcagattcagttaattcgggagatgctgatgtgtgacacatctggatcaatccagctgagcgaggagcagaagagcgccctggcctttctgaaccggggacagccctcaagttccaacgcgggtaataaaaggctgtccactattgatgaaagcgggagcatcctcagcgattag

SEQ ID NO: 31581 - DNA, 420 bp, synthetic construct
  source 1..420: mol_type = other DNA; note = Synthetic coding sequence
atggatacaatgatgctgaacgtacgtaacctgttcgagcagctcgtgcggcgagtggagattctgtcggagggcaacgaggtgcaattcatccagcttgctaaggacttcgaggacttcaggaaaaagtggcagcggaccgaccacgagttgggcaaatacaaggatctcttaatgaaagccgaaacagagaggtccgctctggatgtgaaactgaagcacgcccgaaatcaggtggatgtggaaatcaaacgtcgtcagagagcggaggccgattgcgagaagttggaacggcagattcagcttattcgggagatgcttatgtgtgataccagtggttccatccagctctccgaggagcagaaatccgcactggcgtttttgaatcggggtcagccatcttcttctaacgcgggatag

SEQ ID NO: 31582 - DNA, 3282 bp, synthetic construct
  source 1..3282: mol_type = other DNA; note = Synthetic coding sequence
atgggagggaaagcctggcccagacgcgcagtaggaaccgccggtgggccttgcgccgagcaaatcagcgctcctttccagaccctactcatgccccatttgccactcgcatcatttagacctcccttctggggcttgagacactccagaggccttccaaggttccacagcgtgtctacccagtctgagccacacggaagtccaatcagtcgacgcaatcgtgaggcgaaacagaaacgcttgagggagaagcaagccacgctggaagccgaaatcgcaggtgagtcaaagtcgcctgcggaatcaatcaaggcttggcgtcccaaagaattagttctgtatgagattccgaccaaacccggtgaaaagaaggatgtatctgggccactccccccagcctacagtcctagatatgtcgaagcagcatggtatccgtggtgggtcagggagggtttttttaaaccagagtatcaggccagactgccacaggcaacgggcgagacattcagtatgtgcatccctcccccaaacgttactgggagtctgcacatcggacacgcactcacagtggctatccaggatgctctcgtgagatggcatcgtatgcgcggagatcaggttctctgggtccctgggtccgaccacgctggcatagctacacaagcagtagtggaaaaacagctgtggaaagagcggggagtaagacggcatgagttatctagagaggcttttctccgcgaggtttggcaatggaaagaggcgaagggaggtgaaatctgcgaacaattgcgcgctctgggggcttctttagactgggaccgagagtgctttaccatggatgtgggatcttccgtggcagttacagaagcattcgttagactctacaaagccggtctgttgtatcgcaatcaccagctggtgaattggtcttgtgccctcagaagtgccatctcggacatcgaagtcgagaacaggccactgccaggacatacacagctccggctcccgggatgcccaacgcctgtttccttcggactgctattttcagttgcatttcccgtggacggggagccagatgcggaggtagtcgtcggaacaacacggccagaaaccctgccaggggacgtggcggtggccgtgcatccggacgacagccgctacactcacttacatggacggcaattgcgccacccactcatgggacagcccttgcccctgatcactgactatgctgtgcagccgcacgtggggacaggtgctgtgaaggtcactccggctcacagccctgctgatgcagagatgggagcgagacacggcttgtcccctctcaatgtgattgcggaggacggcacaatgacgtcattgtgtggcgactggttacaaggacttcataggttcgtggctcgtgaaaaaattatgagcgtgctctctgagtggggtctgttcaggggcctacagaaccatcctatggttctgcccatttgttcaagatccggcgatgtgatcgagtatttgctaaaaaatcagtggttcgtacgatgtcaggagatgggcgctcgcgctgcaaaagcagtggaaagcggagccttggaattgtccccctcattccatcagaagaactggcaacattggtttagccacatcggggattggtgcgtatcacgccagctgtggtgggggcaccaaatccccgcttacttggtggtggaggaccacgcccagggagaggaagattgctgggtggtggggcgatccgaggctgaggccagagaggtggctgctgagcttacagggagacccggagccgagctgaccttggaaagggatccagatgtcctcgacacgtggttcagctccgccttattcccattctctgcattgggctggccccaggagaccccagacctagcaagattctaccctttatcactgctggagacaggctctgacctcctcctgttttgggtcgggaggatggtgatgctcggaacccagttaacaggccagctccccttctctaaagtgttgttgcaccctatggtgagggaccggcaagggaggaaaatgtccaaatcgttaggaaacgtgctagatccaagagatatcatctctggggtcgaaatgcaagtgttgcaggaaaagttgaggagtggaaacctggacccagccgagctggcgattgtggccgcagcccaaaaaaaagacttcccacacggaatccccgagtgtggaaccgacgcacttcgcttcacgttgtgctcgcacggcgtccaggccggagatctccacttgtctgtatccgaggttcagtcctgtcgacacttctgcaacaaaatctggaacgcccttagatttatcttaaatgctcttggggaaaaatttgtgccccaacccgctgaggagctgagcccaagttcgccaatggatgcatggatcttgtctagactggccctagccgcacaggaatgcgagcgaggcttcttgactcgagaactctctctggtgacgcacgcactccaccacttctggctccataacttatgtgatgtctacctggaagcggttaagcccgtgctctggcactcaccccgaccccttgggcctcctcaagtcctctttagttgtgctgaccttggcctgcggctgctggcgcctttaatgccattcctggcagaggaactgtggcaacggctgccccctaggccgggatgcccccctgctccaagcatcagcgtcgccccatacccgagcgcatgcagccttgagcactggaggcagcctgaactggaaagaaggttctccagagtgcaagaggtcgtgcaggtgctccgagctctccgcgcaacgtaccagcttacaaaggctaggccacgtgtccttctgcaatcatcagagccaggggaccagggcttgtttgaagcgttcctcgagcccctcgggacattggggtactgtggcgctgtggggctactccctcctggtgcggctgctccttctggatgggcccaggcccctctcagcgatacagcccaggtgtatatggagctgcagggactagttgatccacagatccaattacctttactggccgctcggcgatacaagttacagaaacagctggatagtttgaccgccaggacaccatcggaaggggaggcgggtacgcagcgtcaacagaaattatcatcacttcaacttgagctctccaaacttgacaaggcagccagccacctcaggcaactgatggatgaaccccctgcccctggaagtcccgaattgtag

SEQ ID NO: 31583 - DNA, 231 bp, synthetic construct
  source 1..231: mol_type = other DNA; note = Synthetic coding sequence
atgaactctgtgggggaggcctgtaccgacatgaagagggaatacgaccagtgctttaaccgctggtttgctgagaagttcctaaagggggattcatcaggggacccatgcacggatcttttcaagaggtaccagcagtgtgtccagaaggctataaaagaaaaagaaatcccaattgagggactcgagttcatgggccacgggaaggaaaagccagagaattcttcttag

SEQ ID NO: 31584 - DNA, 735 bp, synthetic construct
  source 1..735: mol_type = other DNA; note = Synthetic coding sequence
atggagttgactatcttcatcctgagactcgccatctatatcctcacattccccctttatcttctcaacttcctgggactctggtcctggatttgtaagaaatggttcccgtactttctcgttcgcttcacggtgatttacaacgagcagatggcttcaaaaaaacgtgaactcttctctaatttacaagaattcgctggaccttccggcaaactcagcttgttggaggtcggatgtggaaccggggctaattttaagttttatccccctgggtgtagggttacctgtattgatccaaatcccaattttgagaagttcctgatcaagtctatcgctgagaaccggcatctgcagtttgagagattcgttgtggccgctggcgagaatatgcaccaagttgctgatggcagtgtggatgtagttgtgtgtacactggttctgtgtagcgtcaaaaatcaagagcgtatcctgcgcgaggtgtgcagagtattacgccctggaggggctttctacttcatggaacacgttgccgctgaatgctccacttggaactacttctggcagcaagtgctagacccggcttggcatttgttgttcgacggttgtaatctgaccagggagtcatggaaggctctggaaagggcatcgtttagcaaacttaaactccagcacatacaagcacctctctcatgggagttagtacgaccccacatctatggctacgccgtcaagtag

SEQ ID NO: 31585 - DNA, 774 bp, synthetic construct
  source 1..774: mol_type = other DNA; note = Synthetic coding sequence
atgccccatcttcctctcgctagcttccgcccacccttttgggggcttcgccactcccgcggattgccccgttttcattctgtgtctactcaatccgagccccacgggtccccaatctcaagaaggaaccgtgaggcaaaacagaagcgactccgggagaaacaggcaacacttgaagcagaaattgcgggtgagtcgaaatccccagctgaaagcattaaagcctggaggccgaaggaactggtgttgtacgaaatcccaactaagcccggagaaaagaaggatgtgtctgggccactcccacccgcatacagtccaaggtacgttgaagccgcttggtacccctggtgggttagggaaggcttttttaaacctgagtatcaggcacgcctcccacaggccaccggcgagactttttcaatgtgtattccacctccaaacgtgaccgggagtttgcacatcggccatgccttaactgtggctattcaagatgccctcgtgcggtggcataggatgcggggagaccaggtcctatgggtcccagggtctgaccacgctggcattgccacccaggcggtggtggagaagcaactgtggaaggaaaggggggtacgccgacacgagctatcccgcgaagcgttcttgagagaagtgtggcagtggaaagaggctaaggggggagagatctgcgaacagctgagggctctgggagcatcactcgactgggatagggtgttctaccatggctgctggttactctcaggatgcgactag

SEQ ID NO: 31586 - DNA, 804 bp, synthetic construct
  source 1..804: mol_type = other DNA; note = Synthetic coding sequence
atgtccaagagtgagtcacccaaggaaccagaacagctgaggaaactttttatcgggggactatcctttgagaccacggatgaatctttaaggtcacattttgagcagtggggaaccctgactgattgcgtggtgatgcgagaccccaataccaagcgcagtagaggtttcggcttcgtaacctatgctacggtggaggaagtggacgcagccatgaatgccagaccgcataaggtggacggacgggtagtcgagccaaaacgtgcggtgtccagggaagattcacagagaccaggcgctcacctgacagtgaagaaaatcttcgtcggcggaattaaagaggatacggaggagcaccatcttcgcgattattttgaacaatatggcaaaatcgaggtcatcgagattatgactgatcggggaagcggtaagaagaggggtttcgccttcgtcacttttgatgaccacgacagcgtggacaaaatcgtgattcagaagtatcacaccgtgaacggccacaattgtgaagtcagaaaggctctgtcaaagcaagagatggcctccgcatctagcagccaaaggggacgaagcggatctggaaactttggcggtggtagctacaacgattttggaaactataataaccaatctagcaactttggccctatgaagggaggaaattttgggggtcgctccagtggaccttacggagggggagggcagtacttcgctaagccaaggaaccaaggcggatacggaggttcaagcagttcgtctagctacggctccggaaggaggttctag

SEQ ID NO: 31587 - DNA, 531 bp, synthetic construct
  source 1..531: mol_type = other DNA; note = Synthetic coding sequence
atgaacgagagcaaacctggagactcacaaaacctcgcatgcgtcttttgtcgcaaacacgatgattgtccaaataaatacggagagaagaaaactaaagaaaagtggaacctgaccgttcactactattgcttactcatgtcttccggcatttggcagaggggcaaggaggaagagggcgtgtacggttttcttatcgaggatatcagaaaggaagtgaaccgcgctagcaaactgaagtgctgcgtctgcaaaaaaaacggggcatccatcggttgtgtagcaccgagatgcaaaagatcttaccatttcccttgcggactgcagagggaatgcattttccaatttacaggcaattttgcctcattttgttgggaccaccggccagtccagataattacctccaataattatcgtgagtccctgccttgcacaatctgcctggaattcatcgaaccaattccttcctacaacattctgcgaagtccttgttgcaagaacgcttggttccatagagactgtctgcaatag

SEQ ID NO: 31588 - DNA, 3171 bp, synthetic construct
  source 1..3171: mol_type = other DNA; note = Synthetic coding sequence
atgctgagtgtagtggagaacggcctggatccacaggctgctatccctgtgatcaagaagaagctcgtgggttccgtcaaagcactccagaagcagtatgtgagcctcgacactgttgtgacatcagaagacggggacgcaaatacaatgtgttctgcgctcgaagcggtcttcatacacggactacatgcaaaacacattcgggctgaggctgggggtaagaggaaaaaaagcgcacatcagaagcccctgcctcagcccgttttctggccgcttttaaaagccgtgacccacaagcatatcatctctgaactggaacacctgaccttcgtgaataccgatgttggcagatgtcgggcttggctgaggttagccctgaacgacggtcttatggaatgttatctgaaattgctgctgcaggagcaagctcgcctgcatgagtattaccagccaaccgcgttgctgcgagacgccgaggaaggcgaattccttctgagcttcctccaaggactgaccagtctgtctttcgagctcagctataagtccgctattctaaatgagtggacactgacaccccttgcactgagcgggctgtgtccacttagcgagttggacccactgagtacttccggcgcagaactgcagaggaaggagagtcttgattcaatttcccacagtagcggctccgaggatatagaggtgcaccattccgggcacaaaatacgacgtaaccagaaactgaccgcctcctcattgtcactagatacggcctcatccagccaactctcctgttctcttaatagtgacagctgcttacttcaggaaaacggaagtaagtcgcccgatcattgcgaggaaccaatgtcttgcgactcagacctgggcacagctaatgcagaagactcagatcgcagcctgcaggaggtcctcctggagttttctaaagctcaggtcaattccgtgcctactaatgggttgtctcaggagactgagatccccactccacaggcctccctaagcctccatggcctcaatacatccacatacctgcattgcgaggctccagcagagccgctgccagcacaagcagccagcgggacacaggatggcgtgcatgtgcaagagccacgaccacaggcgccaagtcccctggacctgcaacagccagttgagtcaacatccgggcagcagcctagtagcaccgtgtcagaaactgcgagggaggttggtcagggtaatggcctgcaaaaggctcaggctcacgacggggctggtcttaaactggtcgtgtcctctcccacctctcccaagaacaagagttggatctcggaagacgatttttatcggccttcacgggagcagccactcgagagtgcaagtgatcacccaatcgcatcttaccggggaactccaggcagccggccagggttgcatcggcattttagccaagagcctcgaaaaaactgctctctgggcgcactcgaccaggcctgcgttccctccccgggtcgacgccaagcccaggccgctccctcccagggccataagagttttcgcgttgtgcatcggagacagatgggtctgagcaatccattccggggattaatgaaactgggcacagtcgagaggaggggcgcaatgggcatttggaaagagctcttctgcgagcttagcccactcgagtttcgcctctatctctctaacgaggagcatacttgtgtcgagaattgctccttattgcgatgcgaaagtgtaggcccagcccactctgacgggcgatttgaactcgtcttcagtgggaagaagctcgccctgagagcctcatctcaagacgaggcagaggattggctcgaccgtgttagagaggcccttcagaaggtgagaccacaacaggaagacgagtgggttaacgttcagtatccagatcagcctgaggagccccctgaggcccctcagggctgcctctctccttcggatctcctcagtgagcctgcggctctgcaaggaacgcaattcgactggtcaagcgcgcaggtacccgagcctgatgcaatcaaagagtccctgttgtatctgtacatggacaggacttggatgccctacatattctcactgtcactcgaggcgttaaagtgcttccgaataagaaataatgagaagatgctatctgactctcatggggtagaaaccataagggacatcttgcctgacacatctctcgggggtccttcctttttcaagatcatcactgccaaggcagttttaaaactgcaggccggaaatgccgaggaggctgcactgtggcgagaccttgtgcggaaggtgttagcttcttatctcgaaactgccgaggaggccgtcactctcgggggttcacttgatgagaattgtcaagaggtgttgaaattcgcaacccgcgagaatgggtttcttctccagtacctggttgctatccctatggagaagggcctggattctcaaggatgcttttgtgccggatgcagccggcaaatagggttttcctttgtgcgccctaaactttgtgccttcagtggcctgtactattgcgatatctgccatcaggacgatgccagtgtgattcctgccagaattatacacaactgggatctgacgaagcggccaatctgccgacaggcgttaaaattcctgactcaaatcagagcacagcctctcattaatcttcagatggttaacgcttcactgtacgagcacgttgaaaggatgcatcttatcggacggagaagggagcagctcaagttgttgggggactatcttggtttgtgccggagcggcgctctcaaagaactgtctaagaggctgaatcatcggaattacctgctcgaatcaccccacaggttcagcgttgccgatctgcagcagattgccgacggcgtctacgagggtttcctcaaggcgttgatcgagttcgctagccagcatgtatatcattgcgatctctgtacccagcggggatttatatgccagatctgccagcatcatgacatcatctttcccttcgagttcgataccaccgtaaggtgcgcagaatgcaagacagtgtttcaccagtcgtgccaggcagtggttaagaaaggctgcccacgctgcgcacgtagacgcaaatatcaggaacagaacattttcgcttag

SEQ ID NO: 31589 - DNA, 390 bp, synthetic construct
  source 1..390: mol_type = other DNA; note = Synthetic coding sequence
atggctgaactgatacagaagaaattgcagggggaggtggaaaaataccagcagttacaaaaggacctgagtaagagcatgtccggaaggcagaagctagaagcacagcttaccgagaacaacatagttaaagaagagctcgcactcctggacggatccaacgtggtctttaagctgttgggacctgtactggttaaacaagagctgggtgaggctcgcgcaacagttggcaagagattagactacattaccgccgaaattaagagatacgaatcacagttacgcgaccttgaacgacagtccgaacagcagcgggagacactcgctcagttgcagcaggagttccagagggcccaggcagcaaaagccggtgccccagggaaagcgtag

SEQ ID NO: 31590 - DNA, 348 bp, synthetic construct
  source 1..348: mol_type = other DNA; note = Synthetic coding sequence
atgacaaagaaaaggcgcaataacggtcgtgccaaaaagggtaggggccacgtacaacccatccgatgtacaaattgtgctcgctgtgtgccgaaggataaagctatcaagaagttcgtaataaggaatattgtggaagcggcagcagtccgcgacatttcagaggtgtcagttttcgacgcatatgtgctgcctaaactgtacgtgaagcttcactactgcgtgtcctgcgcaatccattcaaaggtggtgcgcaataggtctagggaggctaggaaagaccgaaccccgccacctcgcttccgtccagcaggtgcagccccaggacccccacccaagccaatgtag

SEQ ID NO: 31591 - DNA, 1899 bp, synthetic construct
  source 1..1899: mol_type = other DNA; note = Synthetic coding sequence
atggacactatgatgctcaacgttaggaacctgtttgaacaactggtgcgtcgggtggaaatcctttccgagggcaacgaagtacagttcatccagctggccaaggactttgaggacttcaggaagaagtggcagcgtacagaccacgaattaggcaaatataaagacctgttgatgaaagctgaaacagaaaggtctgctctggatgtgaaactgaagcatgccagaaaccaggtggatgtggagatcaagagaaggcagagagctgaggcagactgtgagaaactggaacgtcagattcaactaattagggaaatgttaatgtgcgacacgagcggctccattcagctgtccgaagaacaaaagagtgccctggcttttctcaatcgaggccaacccagttcttcgaatgctggaaataagagacttagcactatcgacgaaagtgggtcaatcctgagcgacatttctttcgacaagacagacgagtctctggattgggacagctcgttggtgaaaacatttaaattaaagaagagagagaagcgacggtcaacaagccgccaatttgtggacggtccacctggcccagtgaagaaaacacgctctattgggtctgcagtcgaccaggggaacgagagtatcgtggccaagacaaccgtcaccgttccaaacgacggcggacctatcgaagccgtgtcaaccatcgaaacggtcccctattggacacgaagcaggcgaaaaactggcacccttcagccatggaattccgatagtacactcaactcccgccaactcgagcctagaactgagacagattctgttgggacgccacagagtaatggagggatgcgcctgcacgattttgtgtccaaaactgtgattaagcctgaatcatgtgtgccatgtgggaaaagaataaaatttggcaaactgagtctaaagtgcagggactgtagggtagtgtctcaccccgaatgccgagatcggtgtccacttccatgtatccctacactgataggcacacctgtgaagatcggggagggaatgctagcagactttgtctcccaaaccagccctatgatacccagcatcgtggtgcattgcgttaacgagatagagcaaagaggccttacagagaccggtctgtaccgaatttcgggatgtgacaggactgtgaaagaactcaaggagaagttcttgagagttaaaacagttccccttctgtccaaagtagatgacattcatgctatctgcagtctgctgaaagattttctccgaaatttaaaagaacctctgctcactttccgattaaatagggcttttatggaggctgccgagatcactgacgaggataattctattgcggcaatgtaccaggcagtgggtgaactcccgcaggccaaccgtgatactctagcattcctgatgatacacctgcagcgagtggcacagtcaccacacacaaaaatggatgtggcgaacctcgcaaaagtttttggacctaccattgttgcccacgccgtgcctaatcctgatccagtgacgatgcttcaggacattaagcgtcagcccaaagtcgtcgaacggttgctcagtctacccctggaatattggtctcaatttatgatggttgagcaggagaatattgaccctctgcacgtgatcgagaatagcaacgcgttctcaacgccgcagacccctgacattaaggtctccctgctgggccctgtcactacccctgaacatcagctgctgaaaactcctagctcttcctctctgtctcaacgggtccgatcgacattgacaaagaacacaccgagattcggttccaagtccaagtctgccactaatctgggacggcaaggcaatttctttgcttcccccatgttaaagtag

SEQ ID NO: 31592 - DNA, 390 bp, synthetic construct
  source 1..390: mol_type = other DNA; note = Synthetic coding sequence
atggcagaattaatccaaaagaagttgcagggtgaagtggaaaaatatcagcaactgcaaaaggatctatcaaagtctatgagtggacggcaaaaactcgaggcacagctgaccgagaacaatatagtcaaggaagaattggccttgcttgacggttccaatgtggtctttaagcttcttggaccagtcctcgtaaaacaggagttaggagaggcacgggcaacagtggggaagcggctggactacataacagcagagatcaagcgctacgaatctcagcttagggatctagagcgccagagcgaacagcagagggagacgctggcccagcttcagcaggaatttcagcgcgctcaggccgcaaaagctggcgcacctggcaaggcctag

SEQ ID NO: 31593 - DNA, 5219 bp, synthetic construct
  source 1..5219: mol_type = other DNA; note = Synthetic coding sequence
atgatggagggtaacgggactgagaatagctgtagccggaccagaggttggcttcagcaggataacgacgcaaaaccctggttatggaaattcagcaattgcttctctaggcccgagcagacattgcctcatagccctcagactaaggagtacatggaaaacaaaaaagtggctgtcgagttaaaagacgtcccaagccccctgcacgccggttctaagctgtttccggctgtgcccctccccgatattcgttctctgcagcagccaaagatccagcttagcagcgtgccaaaagtgtcctgctgcgctcactgccccaatgagccaagtacctctccaatgcggttcggcggtggtgggggagggtctggcggaacctcttccttaatacacccaggcgcattgctagatagccagtcaactcggaccataacttgtcaggttggctcaggattcgctttccagagcgcatcctcactccagaatgcatctgccagaaacaacctggccggtatcgccagtgatttccccagcatgtgcctcgagtcaaatctaagcagctgcaagcacctgccttgctgcggcaaactccattttcaaagctgccatggcaatgtgcataagctgcatcaattccccagcctgcagggttgtacatctgccggttatttcccatgcagcgacttcaccagcggcgcacctggacacctcgaggaacatatcagccagagcgaacttactcctcacctatgtacaaattcactgcacttgaacgttgttcctcccgtctgtttgaagggctctctctactgcgaagattgcctaaataaaccggctaggaactccatcatcgatgctgcaaaggtctggccaaatatacctcccccaaacactcagcctgcccctctggctgtcccgctgtgtaacggctgcggaaccaagggcacagggaaggagaccacacttctgctggccacttccctcggaaaggctgcctctaagttcgaagttgctgtcgctggacaagtacttgagaacttgccaccgattggggtgttttgggatattgaaaactgctctgtcccctcaggcaggtctgcaactgctgtagttcagaggattcgggagaaattttttaagggacaccgcgaagcagagttcatctgcgtgtgtgacatctccaaggagaacaaagaggttatccaggagctcaacaattgccaagttacagtagcacacataaatgccactgcaaagaacgcggctgatgataagctccggcaatccctgcgtcgtttcgctaatacccacaccgctcccgctaccgttgtgctggtgagtacagacgttaattttgcgcttgaactgagtgacctgcgccatagacatggcttccacattatccttgttcacaagaaccaagcatctgaggcgctgctgcaccatgcaaatgagctgatcaggtttgaggaatttatatctgaccttcccccaaggctgcctctcaaaatgcctcagtgtcacacattgctgtacgtttacaatttaccagccaacaaagacggaaagtctgtaagcaataggctaagaaggctctctgataattgtggaggcaaggtcctttctatcaccggctgctcagcaatactaagattcatcaaccaggatagtgccgagcgtgcgcagaagcgcatggaaaatgaagacgtattcggtaaccggatcattgtcagttttactccgaaaaaccgagagctttgtgaaacaaaaagctccaacgctattgcagataaggtgaaatccccaaagaagctgaaaaatcccaagctctgtctgatcaaggacgcaagtgagcagtcttcctctgctaaggctacacccggaaagggctcacaggccaactccggctctgcaaccaagaacacaaacgtgaagagtctgcaggaactttgccgaatggaatctaaaaccggacaccggaacagcgagcatcagcagggccacttgaggctggtggtgcccacccatgggaacagtagcgccgctgtgtcaacaccgaagaatagcggagtggccgaacccgtctataagacctcacagaaaaaagagaacctatccgccaggtccgtgacttcttcgccagtggaaaaaaaggataaagaggaaacagtgtttcaggtgtcttatccttcggcgttttccaaactcgtcgctagcaggcaggtaagccccctgctggcgtcccagtcttggagttcaagatccatgtctcccaaccttctcaatagggcaagccctttagcattcaacatagcaaacagcagtagcgaagcggattgcccagatccgttcgccaacggtgcagatgttcaagtgtcaaacatcgattacaggctttcccgcaaagaactgcaacagttgctccaggaagcatttgctaggcacgggaaggtcaaatccgttgaactgtcgccccacactgactaccaattaaaagctgtcgtacagatggagaatttacaggatgctattggcgcagtcaactctctgcatcgctataagatcgggtccaaaaagatcctcgtgtccctggccaccggagccgcatctaaaagtttgagcctcctcagcgctgaaaccatgtctgtgcttcaggatgcacctgcttgctgtctgccgctgttcaagttcactgatatctacgagaagaaatttggccacaagcttaatgtgagcgatctgtacaagctgacagacacagtggccatacgagaacagggaaatgggagactggtttgtctcctacccagtagccaggctaggcagtcccccttgggtagtagccagagccatgacggcagctcaaccaattgtagccccattatatttgaggagctagagtatcatgaacctgtttgccgtcagcactgctccaacaaggatttttcagagcatgagtttgaccctgacagttacaagattcccttcgtgattctttcactgaagacgtttgcacctcaagttcactccttattgcagacacatgagggcacggtccccctgctttcattccccgactgctatatcgcagaattcggcgatctggaggtggtacaggagaatcaaggcggagtaccgctcgagcactttataacctgcgtgcctggggtcaacatcgccactgcccagaacggcatcaaggttgtgaagtggatacataacaaaccgccaccccctaatacggacccatggttgctgaggtcaaaatcaccagtcgggaacccccagctcatacagttctctagagaagttattgatttgctcaaatctcagccaagctgcgtcattcccattagtcatttcatcccatcctaccaccaccacttcgccaagcagtgccgagtatccgactacgggtatagtaaactcattgaacttctggaagccgttccacatgtgctccagatactgggaatgggctctaagcgcttactaacattgacccatcgagctcaggtcaaacggttcacgcaagacctgttgaaactgctcaaaagtcaggcttccaagcaagttatcgttagggagttttctcaggcatatcattggtgcttctctaaagattgggatgtgaccgaatacggagtgtgtgaacttattgacatagtctccgagattccagacacaaccatttgcctgagtcagcaggataatgagatggtgatttgcattcctaaacgggagcgtacccaggacgagatcgaacggactaagcagttctctaaagacgttgtggacctgctgaggcatcagccacacttcagaatgccgttcaataaattcatcccatcttatcaccatcattttggaaggcaatgtaagctggcgtactacggctttacaaagctgctcgaactctttgaagccattcccgacacactccaggtgcttgaatgcggcgaggaaaagatattgactttgaccgaggtggaacgctttaaggctcttgcagcgcaattcgtcaaattgctacggtctcagaaagacaactgcctcatgatgactgatctactgacagaatacgctaagacctttggatatacatttaggctgcaggactacgatgtgtcctcaatatcagcactaacacagaaactctgccatgtggttaaggtggccgacatcgagagtgggaggcagattcagctgatcaatcgcaagtcgctgagaagcctcaccgcccaactattggtcctcctcatgagttgggaagggactacacacctgagtgttgaggagctgaagcggcattatgagtccacacataacacacccttaaatccctgcgagtatggattcatgacactgaccgaactcttaaaatcactcccttatctcgtggaagtcttcacaaatgacaagatggaggagtgcgtgaagcttacatctctgtacctctttgccaaaaatgttagaagcttgctgcatacctaccactaccagcaaatcttcctgcacgagttttcaatggcatacaccaagtacgtgggggagactctgcagcccaaaacctatggccacagctctgtagaagagctgctgggagctatcccccaagttgtgtggattaagggtcacgggcataaacggatcgtggtgcttaaaaatgacatgaaatcacggctgtcctcactgtctttgagcccagcaaaccatgagaatcagccttctgagggagagcggatcctggaggtaccagaaagccacaccgcaagcgagctgaagctaggggctgatggatctggtccgtcccacacagagcaagaactgcttagactcactgacgacagccctgtcgacctgctctgtgcccctgtgccttcttgtttgcccagcccccagctgcggcctgacccagtgatcttgcagagtgctgatctcattcagttcgaagaacggccacaggaaccgagcgagataatgatcttgaatcaggaagaaaagatggagatcccaattcccggaaaatctaaaacactcacttctgattcctcttcaagttgcatttcagccgcagtccctgtccccccttgcccatcgtcggaaaccagcgaatctctgctgagcaaggatccagttgaatctccagccaaaaaacagccaaagaaccgcgtgaagttggcggctaacttcagcctcgccccaatcacgaaacttta

SEQ ID NO: 31594 - DNA, 390 bp, synthetic construct
  source 1..390: mol_type = other DNA; note = Synthetic coding sequence
atggctgagctaatccagaaaaagctgcagggggaggtcgagaagtatcagcaactgcagaaagacctgagcaaaagcatgagcggcagacaaaagctagaggcacagcttaccgagaacaatatcgtgaaggaggaactggccctgctcgacggctctaatgtggtttttaagttgctggggccagttctcgttaaacaggaactcggagaagcacgtgcaaccgtggggaagcgactggactacatcactgcggaaataaagaggtatgaatcgcagctccgcgacttagagagacagtctgaacagcaacgggaaaccctggcacagctgcaacaggagtttcagcgggctcaggccgcaaaagccggtgccccaggtaaagcatag

SEQ ID NO: 31595 - DNA, 432 bp, synthetic construct
  source 1..432: mol_type = other DNA; note = Synthetic coding sequence
atgacgctccggtgtttggagccatcaggcaatggcggagagggtacccgctctcagtggggaactgcaggctcggctgaggagccatctccccaggcagcacgactcgcgaaagctcttcgggagcttggccagaccggatggtattggggatccatgaccgttaatgaagccaaagagaagctcaaggaggcacccgagggtacattcttgatccgggattctagccatagcgactaccttcttacaatttctgtgaagacgtctgcaggccctactaacttacgaatcgaataccaggatggcaagttcagactggatagcattatctgtgtgaagtcaaaacttaaacagttcgatagcgtcgtccaccttatcgattactatgtccagatgtgcaaagataagaggacagggccagaagccccttag

SEQ ID NO: 31596 - DNA, 156 bp, synthetic construct
  source 1..156: mol_type = other DNA; note = Synthetic coding sequence
atgagtagctctatgtggtatattatgcagagcattcaatccaagtacagcctctccgagcggcttatcaggacaatcgccgctatcagatcgttccctcatgataacgttgaagatcttataagaggcggagccgacgtgaattgcactcattag

SEQ ID NO: 31597 - DNA, 1902 bp, synthetic construct
  source 1..1902: mol_type = other DNA; note = Synthetic coding sequence
atggaggagtctccattgtctcgagcaccctcccgcggaggggtgaatttcctgaacgtcgcaagaacgtatatccccaacaccaaggttgagtgtcactatacactgccgcctggcaccatgcctagtgcatctgattggattggtattttcaaggtggaggccgcttgcgttcgggattaccacactttcgtttggtcaagcgttcccgaatcaactactgacggatcaccaatccataccagcgtgcagttccaggcttcttatctgcccaaacccggtgcacagctgtaccaatttagatatgtgaacagacaaggacaagtatgcggccagtcacctccctttcagttccgggagccccgtcccatggacgaactggtgacactggaggaagccgacggcggatccgacatcctgctggtggtccccaaggcgacggtgttgcagaaccagttggacgaatcacaacaagaacgcaacgacctcatgcagctgaagctgcaactcgaaggacaggtaacagagctccggtcccgggtgcaagagctggagcgagcactcgcaacagcacggcaggaacacaccgagctgatggaacagtataaaggaataagcaggtcccacggtgagatcaccgaggagagagacattctgagcagacaacagggggatcacgttgctcgcatcctggaattagaagacgacatccagactatcagtgagaaggttcttactaaagaggtagagcttgacaggttgagggatactgtcaaggcccttaccagagaacaagagaaattgttgggacagttgaaggaagttcaggccgataaagaacagagcgaggctgagctccaagtagcgcagcaagagaaccatcacttaaacctggatctgaaggaggctaaaagctggcaagaagaacagagtgctcaggcacagcgtctaaaggataaggttgctcaaatgaaagatactcttggacaggcacaacagagagtcgccgagttggagcctttgaaggaacaacttagaggagcacaggaactggctgcatcgtcccagcaaaaggcaactttgcttggcgaggaactcgcctctgccgctgccgcacgcgatagaacaattgcagaactccatagaagcagactggaagtagctgaggtcaatgggagattagccgagttgggcctgcatttgaaagaagaaaagtgtcaatggagtaaggagcgtgccggtctcttgcagtcagtggaggcagaaaaggacaagatcttgaaacttagcgcggagatcctgagactggaaaaggccgtgcaggaggagaggacccaaaatcaggtgttcaagaccgagctggcaagggaaaaggatagttctctggtacaactgtcggaatcaaagcgggagctgaccgagctaagatctgccctgcgggtgttgcaaaaggaaaaggagcagctccaggaggaaaagcaagagctgctagaatacatgcgaaaactggaggctcgccttgagaaagttgcagacgaaaagtggaatgaagacgcaaccactgaggatgaggaggcggctgtgggcctgagctgtcccgcagctttaactgactcggaggacgagtctcccgaggatatgagattacctccctacgggctgtgtgaacggggtgatccgggttccagtcctgccggtccgagagaagcttcccccttggtggtcattagccagccggcacctatctccccccatttgagtgggcctgcagaagattcctctagtgacagcgaggctgaagatgaaaagtcggtccttatggcggcagtgcaaagtggaggcgaggaggccaatctgttattgcccgaactgggatctgccttctatgacatggcccgttag

SEQ ID NO: 31598 - DNA, 810 bp, synthetic construct
  source 1..810: mol_type = other DNA; note = Synthetic coding sequence
atgaagacgccggtggagctggccgtgtctgggatgcaaaccctggggctccagcatcggtgccgcggtggttaccgcgtgaaggcacgaactagctacgtggacgaaactttgttcgggtctccagccggaactcggcctacaccccctgatttcgaccctccctgggtggagaaggctaatcggacaaggggtgtagggaaggaggcctccaaagccctgggtgccaaaggctcatgcgagactacgccttctcggggttctaccccaacattgaccccaagaaaaaagaacaaataccggcctatttctcatacaccttcctactgcgatgagtctctgtttggaagcaggtcagaaggagcctcatttggagcgccacggatggccaagggagacgcagccaagctccgcgctctgctctggacacccccacctacccctaggggatcccactcccctcgaccccgtgaagcccctctgcgggcaattcacccagctggtccctcaaagacagaacccggacctgctgcagacagccagaaattatctatgggtggactgcatagcagtcggcctctcaagagaggtttgtcccactctttgacacacttaaatgttcccagcaccggccatcccgcaacttctgcccctcatacaaacgggcctcaagatctaaggcccagcacaagtggtgtgactttcaggtctcctttggtgacatctcgagctaggagtgtgtctatcagtgtaccaagtactccgaggcgtggaggagcgacccagaaaccgaagcccccttggaagtag

SEQ ID NO: 31599 - DNA, 618 bp, synthetic construct
  source 1..618: mol_type = other DNA; note = Synthetic coding sequence
atggacaaggactcccaaggattactcgacagctccctcatggcctctggcacagctagccgttctgaggatgaagagagtcttgccggtcagaagagggcatcctcccaggcccttggtacgatcccaaagaggagatccagctctcgctttatcaagaggaaaaagtttgacgatgaacttgtggaatcttcgctggccaagagctcgactcgcgctaagggtgccagcggtgtggaaccaggtagatgttctggtagtgagccctctagttctgaaaaaaaaaaggtgtcgaaagccccaagtaccccggtacctccgagccccgcaccagctcctgggctgactaaaagggttaagaaaagtaagcagccactgcaggttaccaaagatctcgggaggtggaaacctgccgatgatctcctactaatcaacgccgtcctgcagactaatgatttgacctctgtgcatctgggcgtgaagttcagttgccggtttacactgagggaagtgcaggaaaggtggtatgcactcttatacgacccagtaatctccaagctagcttgtcaggctatgcgccagctgcatcccgaagcaatcgctgctatccaatcctag

SEQ ID NO: 31600 - DNA, 540 bp, synthetic construct
  source 1..540: mol_type = other DNA; note = Synthetic coding sequence
atggactggacccctcgccttccctcacgtcacattatctctgagctggaacacctaactttcgtcaatacggacgtgggtagatgcagagcatggctccggttagcactgaatgacggtctcatggaatgctatctcaagcttcttctccaggaacaggctagactccaattgcagcgtaaggagagtctggacagtatatcccattcttctgggtctgaagacatcgaggtgcaccatagtggacataaaatcagaagaaatcagaaactcaccgcctcttcccttagcctggacaccgcatcttcctcacaacttagttgttcactcaactcagactcttgcctcttacaggaaaacggttccaaatcgccagaccactgtgaggagcccatgtcttgtgacagtgacttgggaactgccaacgccgaggactccgatcgttctctgcaggagaaaacgagagccggatcgcaacgaatgacatccacaggacttcccggatcaaacccttggcgtgtcctacagaccacacagtag

SEQ ID NO: 31601 - DNA, 735 bp, synthetic construct
  source 1..735: mol_type = other DNA; note = Synthetic coding sequence
atggaactcacaattttcatcttgcgactggcgatctacatcttgacattccccctctatctgctcaatttcttaggactgtggtcctggatttgtaaaaaatggttcccatacttcttagtccgctttacagttatatataacgagcagatggcttccaagaaacgagagcttttcagtaaccttcaggagttcgccggacccagcggtaaattgtctttacttgaagtagggtgcggaacaggagctaactttaaattttatccgccagggtgcagagtcacttgcattgaccctaaccccaatttcgagaaatttctgatcaagtctatcgctgagaaccggcatctgcaattcgagcggtttgtagtcgcagctggagaaaacatgcaccaggtggcggatggttctgtggatgtcgtcgtgtgcaccttggtgctatgctccgtcaagaatcaggaaagaatactgcgggaagtgtgccgggtcctaagacccggaggagcattttatttcatggagcatgtggccgcagagtgtagcacatggaattacttttggcaacaggtgctggacccagcttggcatctactgtttgatggctgcaacttgacacgagaatcctggaaagccctcgagagagcttctttctcgaagctcaagctccaacacatacaagctcccctgagctgggagctggtacggccacacatctacggatatgcagtcaagtag

SEQ ID NO: 31602 - DNA, 558 bp, synthetic construct
  source 1..558: mol_type = other DNA; note = Synthetic coding sequence
atggataaggacagtcaaggtttactggattcctccttgatggcctctggtacagcaagtcggtccgaagatgaggaatcgctggccggacaaaagcgggcttcttcgcaggcactcggaaccattccgaagcggagatccagtagcagattcataaagagaaaaaaattcgacgacgagctggtagaatcaagtctagccaagagttctaccagagcgaagggtgccagcggcgtcgagcccggaaggtgctcaggttctgagcctagtagttctgaaaaaaagaaggtgagcaaggcgcctagcactccggtgccaccctctccagctccggctccaggtttgactaaaagagtgaaaaagtccaagcagcccttacaagtcacgaaagatctgggcagatggaagcctgccgatgatctgctgctgattaacgctgtcctacagactaacgatttaacatctgttcacttgggagtgaaattttcatgccggttcaccttaagagaggtgcaggaacggtggtatgccctgctctacgatcctgtgatttcttag

SEQ ID NO: 31603 - DNA, 3003 bp, synthetic construct
  source 1..3003: mol_type = other DNA; note = Synthetic coding sequence
atggtggaatgcttcgaatctggaggtactcggctcagcctttctagcttcaacgtgtcgtgcgattctctaagagaacagctccgtgagtggaggtgcttccagtggtggcgcatggactggacccccagactgccaagccgccatataatctccgagttagagcatctcacatttgtgaatacagatgtaggacgatgccgcgcttggctccggttggcccttaatgacggactgatggaatgttaccttaaacttctgctgcaggagcaggctcgactgcatgagtattatcagccaaccgccctccttcgggacgccgaggagggagagttcctgctgtcatttctccagggtcttacgagcctttcctttgagctgagctataaatcagcaatattgaatgaatggacgttgaccccgctggctctttctggactgtgccccttaagtgagttggatcctctcagtacatccggggctgaactgcagcgcaaagaatccctcgattccatctcccactcttcgggcagcgaggacatagaggttcaccacagcggacataagatcaggcggaaccagaagctaacagccagctcactgtccctcgacaccgcctcaagtagtcagcttagctgctcactgaatagtgacagttgccttctgcaggagaatgggagcaaaagtcccgatcactgcgaggaaccgatgtcatgcgattcagacctgggtacagcaaatgccgaggatagcgaccgcagcctgcaggaggtcttgcttgaattcagtaaggcccaggtgaacagtgtgccaactaatggcctctcgcaggagaccgagatcccaaccccgcaggcaagcctgagtttgcatgggctcaatacttccacatacttgcactgcgaggcacctgctgagcccttacctgcccaggcggctagcggaacccaagacggagtccacgttcaagaacctcgaccacaagccccaagccccctggacttgcagcagcctgtcgagtcgaccagcggacagcagccctccagcacagtaagtgagaccgcacgtgaggttggccagggcaatggccttcagaaggcccaggctcatgatggggcagggttgaagctggttgttagttctccgacttcaccaaaaaacaaatcttggatctctgaagacgacttctaccggccaagtcgagagcagccactcgaaagcgccagcgatcaccccatcgcgagttatcgtggcaccccaggctcccgtccaggccttcaccgtcatttcagtcaggagccgcgtaagaactgtagcctcggcgctctggatcaggcctgtgtgccttcccccggtcgaaggcaagctcaagccgcaccatcacaggggcacaagtcattccgggttgtgcaccgcagacagatgggcctgtcaaatccattccgagggcttatgaagttgggcacagtggagaggcgaggagccatgggcatatggaaagagctgttttgtgaactctctccattggagtttcgtctatacctgtccaacgaggaacatacgtgtgtggagaactgctccttactgcgatgcgagtccgtcggtccggctcattctgatggaagatttgagctggtgttctctggaaagaagttggcgctgagggccagctcccaggatgaggccgaagactggctcgatcgggtccgcgaagccctgcagaaagtgcgccctcagcaggaggatgagtgggttaacgtgcaatatcccgatcagccagaagaaccccctgaggcacctcagggctgcctgtcgccttcagacctcctaagcgagccagctgcgcttcaaggaacccagtttgactggtcctctgcccaagtgcctgagccagacgccattaaggagagtctcttgtacctgtatatggaccgcacctggatgccctatatcttcagtttatctcttgaggcgcttaaatgctttcgcattaggaacaatgagaaaatgcttagcgattctcatggagtggagacgatccgggatatcctgccagatacctctctcggcggacccagctttttcaagatcattacagctaaagcggtgcttaaactgcaggcgggaaatgcagaggaggccgctttgtggcgtgaccttgtgcgcaaagtgcttgcgtcttacctggagactgcagaagaggccgtgacactgggcggttcactcgatgagaattgccaggaagtactgaaatttgccactagggagaatgggtttcttctccagtacttggtcgccatcccgatggagaaggggctcgattcacagggatgcttctgcgcagggtgctcacgtcagataggtttcagctttgtgcggcctaaactgtgcgcttttagtggtctctattattgcgatatatgccaccaggacgacgcatccgtgatcccggcacgcattatccataactgggatttgactaaacgaccaatctgcaggcaggccctgaagttcttgacacagatcagagcacagccactgatcaatctacagatggtgaacgcaagcttgtacgaacatgtggagcgcatgcaccttattggcagacgcagggaacagctgaagcttctgggggattatttaggactgtgtcgctcaggcgctctcaaagagctttctaaaaggctcaaccatcggaattacctgctggagtccccacaccggttctcagtcgccgacctgcagcagattgctgatggagtgtacgaaggtttttctccgaaggtgccaagcgaggccgctgggctaagaccttggggggctcgttccccggaagcagccagcgcatttagatgtatcgactcatcccacctgccctcactgagaaaggtggtccccacactctttctaaagtgttactttatgcagtacaccgtccccagcgaacagggctctgggccagaggagagtctgcagtgcatagaaggcatcgccgcagtatag

SEQ ID NO: 31604 - DNA, 525 bp, synthetic construct
  source 1..525: mol_type = other DNA; note = Synthetic coding sequence
atggataccatgatgctgaatgtacgcaacctcttcgaacagctcgttcggcgtgtggagatcctgagcgaggggaatgaggtccagtttatccagctggcaaaggacttcgaggattttaggaaaaaatggcaaaggacggaccacgagctggggaagtacaaagatctgctgatgaaggcagaaaccgaaaggtcagctcttgatgttaaactgaaacatgctagaaaccaagtagatgtggaaatcaagaggcggcagcgagccgaggcggactgtgaaaaattggaaaggcagattcagctcatcagggagatgctgatgtgtgacacctctgggtcgattcagttatcagaagaacaaaagtctgcgctcgccttccttaatcgtggccaaccttcatcttccaatgctggtaataaacgcttgagcaccatagatgagtcaggctccattttaagtgacatcagttttgacaaaaccgacgagtccctggactgggattctagtctcgttaaaacatag

SEQ ID NO: 31605 - DNA, 2904 bp, synthetic construct
  source 1..2904: mol_type = other DNA; note = Synthetic coding sequence
atggattggacccccagactgccctccaggcatatcattagcgagctggaacacttgacattcgtgaatacagatgttggcaggtgccgtgcttggcttcgcttggccctcaatgatggcctgatggagtgctatttgaaactcctcctccaggagcaggctcgtttgcacgaatactatcaaccaactgcccttctgcgggatgcagaggagggagagttcctgctgtcctttctgcaaggtctaacctccttgtcattcgagctgtcatacaagtccgcaatcctgaatgagtggacgctaactcctctcgccctgtctggactgtgccccctctctgaactggaccccctgtccaccagcggagccgagctgcagcgcaaggagtctctagacagcatttcccattccagtggaagtgaggatatcgaagtgcaccatagtggacataaaatccgccgtaaccagaagttaacagcatctagcctgtccctcgatactgcctctagctcccagctgagctgctccttaaatagtgatagttgtctgctacaggagaacggcagtaagtcacccgatcactgcgaagagcctatgtcctgtgattcagatttaggcactgcaaatgccgaagacagcgaccggagtttgcaggaagtcctgcttgaattttcgaaggcacaggttaactccgtgccgacaaacggtctcagccaggaaactgagatccccacgccccaggctagtctatcgctccatgggctgaatactagcacgtacttacattgcgaagcccctgctgagcctctccctgcccaggccgcatcaggtacacaggatggagtgcatgtgcaagaacctaggccccaggccccatcgcccctcgatcttcagcagccagtggagtctacgtccggccagcagccaagctctacagtgagtgagactgcgagggaagtgggccaaggaaacggacttcagaaagctcaggctcacgacggcgcaggccttaaattggtagtctcctctccaacctctccaaaaaacaaatcctggattagcgaggacgacttttacaggccctcccgtgaacagccccttgaaagcgcgtctgaccatcctatcgcctcttaccgaggcactcctggctcccgccctggcctgcatagacacttctcccaggagcctcggaaaaattgctccctgggagccctggaccaggcctgcgtgccctctccagggagaagacaggctcaggctgctccttcacaggggcacaagagctttcgggtcgtgcatcggcgacaaatgggcttatcaaacccgtttcgcggactgatgaagctgggaaccgtggaaaggaggggcgcaatgggcatatggaaggagttattctgcgagctgagccccctcgagttcaggttatatctaagtaacgaagagcacacttgtgttgagaactgctccctgttaaggtgcgagtctgtggggccagctcactccgatggaagattcgaattggtgttcagtgggaaaaaactcgccctgagagccagcagccaggatgaagctgaggattggctcgaccgtgtgcgagaggcactacagaaggtgagaccacagcaggaagatgaatgggttaatgtccaataccccgatcagccagaagagccacccgaggcgcctcagggctgccttagcccttccgacctgctgagtgagcctgctgctttgcagggtacacagtttgactggtcttcggcacaggtgcccgaaccggatgcgatcaaagagtcactgctgtatttgtacatggatagaacctggatgccctatatctttagtctaagtctggaggctctgaagtgcttccgcatccggaacaacgagaagatgctgagtgactctcatggagtcgagaccatcagggatatactgcctgatacctccttaggaggaccgtccttttttaagattataacagcaaaagcggtcctcaaacttcaagccggaaacgcggaggaagcggcactttggagagatctcgttaggaaagtgttagcttcatacctcgaaacggctgaagaggctgtcacgctagggggtagcctcgacgaaaactgccaggaggtgctgaagtttgccacgagggagaatggtttcctccttcagtacctggttgccattcccatggagaaagggctggattcccagggctgcttttgcgccggatgcagtcggcagatcggcttctctttcgtgcggccaaaactgtgtgcgttctcaggtctctattattgcgatatttgtcaccaggacgacgcgagcgtcatccccgctaggatcatccacaactgggacctgacaaaaaggccgatctgcagacaggccctgaaatttctgacacagatcagagcacaacctcttatcaacttacaaatggtgaatgcttctctttatgagcatgttgaaagaatgcatttgatagggagacgccgagagcagttgaaactgttaggtgactatcttggcttgtgtcgctccggcgcactgaaggaactgagcaagagactgaatcaccggaactacctgctggaaagccctcatagattctcagtcgccgacctgcaacagattgctgacggtgtgtacgaagggttccttaaggccctcattgaatttgcctctcagcacgtttaccactgcgatctctgcacacagagggggttcatctgccaaatatgtcagcaccacgacattatttttccttttgagtttgacaccacagtcaggtgcgcggagtgcaaaacggtgtttcatcaatcttgtcaggcggttgttaagaaaggctgcccccgatgtgcgaggcgcagaaagtatcaggagcagaacatatttgcatag

SEQ ID NO: 31606 - DNA, 1446 bp, synthetic construct
  source 1..1446: mol_type = other DNA; note = Synthetic coding sequence
atggcctcagccgcatcagtcactagtttggctgatgaagttaattgcccaatatgtcaggggaccctgcgggaaccagtgacgatagattgcggtcacaatttctgcagagcctgccttacccgatactgtgagattccagggccagacctggaggagtcgcctacctgtcccctgtgtaaagaaccttttcgcccaggaagcttccggcctaactggcagcttgctaatgtggtcgagaatatcgagcgcctgcagcttgtgagtaccctcggcttaggtgaggaagatgtgtgccaggaacatggggaaaaaatctactttttttgcgaggacgatgagatgcagctttgtgttgtatgtcgggaagctggcgagcatgccactcacaccatgcggttccttgaggatgctgccgcaccttacagagaacagatacataagtgtctgaagtgccttcgcaaggaacgagaggagatccaggagatccagtccagggagaacaaaaggatgcaggtgctactcacgcaggtgagtactaagaggcagcaagtcatcagtgagttcgctcatttgcgcaaatttctggaggagcagcagagcatcctgctggcccagttggagagtcaggatggggacatcctgcgccagcgggacgagttcgacttacttgttgccggagaaatttgcaggttcagcgccctgatcgaagaactagaggaaaagaatgaaaggcccgctcgagaattactgacagatatccggtctacccttatccgttgtgagacacggaaatgtagaaagccggtggccgtgtctcccgagcttggccagagaatcagggacttccctcagcaggctttgccactccaaagagaaatgaaaatgttcctggaaaatctgcccaaccacttagtgatcccaacagctcacatttcacttgacccacagacctcccacccaaagcttctgctgtcagaagaccaccagcgcgcacagttcagctacaaatggcagaattcccctgacaatccacagcgctttgatcgtgcgacatgtgtgctcgcacacacgggaatcaccggcggacggcacacttgggttgtgtcgatcgacttggcccacggaggcagctgtacagttggggttgtttctgaggacgtacagcggaaaggagaactgaggcttaggcccgaagaaggcgtgtgggccgtgcggctcgcgtgggggtttgtgtctgcactggggagcttccccactcggctgaccctgaaagaacagcctcggcaggtgagggtcagtttggactacgaggtaggatgggttacctttaccaatgcggtcacacgtgagcccatctacacctttacggcatccttcacacgtaaggtgatccccttcttcgggctgtggggcagggggtcttcattctcactgtcaagctag

SEQ ID NO: 31607 - DNA, 462 bp, synthetic construct
  source 1..462: mol_type = other DNA; note = Synthetic coding sequence
atggctcctggaagcaggggtgaacggtcttccttcaggtccagacgcggacctggggtgcccagtccccagcccgacgtcaccatgctttctcggctgctcaaagaacaccaggcaaaacagaatgagagaaaagaattgcaggagaagagacgaagagaggccatcacagcggctacctgtctgactgaggctctagttgaccaccttaatgtgggcgtagctcaagcctatatgaaccaaaggaagcttgatcacgaagtaaagactcttcaggttcaggccgcacagtttgcaaagcagactggtcagtggattggcatggtggaaaacttcaatcaggccctaaaagaaattggcgacgtggagaattgggctcgttccatcgaattagacatgcggactatagccacagctctggagtacgtgtacaagggacagctgcagagtgcgcctagttag

SEQ ID NO: 31608 - DNA, 1311 bp, synthetic construct
  source 1..1311: mol_type = other DNA; note = Synthetic coding sequence
atgttgtggaacttcaaacctcatgctagagcctataggtacgtcggccacaaggacgtggtgacctctgtacagttctcccctcacggtaaccttctggcatcggctagccgggatcgcactgtcagactttggataccagataaacgtggcaagttcagtgagttcaaggcgcacactgcccctgtcagaagcgtggacttttcagccgatggccagtttttggctacggctagtgaggacaaaagtattaaggtgtggagcatgtaccgacagagattcctctacagcttgtataggcatacccattgggtccggtgcgcgaaattcagcccagatggccgattaatcgtgagctgctctgaagacaagaccataaagatatgggacaccacaaataagcaatgtgttaataacttttccgacagcgttggttttgccaacttcgtggattttaatccatccgggacctgtattgcttccgctgggtcagatcagaccgtgaaagtgtgggacgtaagagtcaacaagcttcttcaacattatcaagtacactcaggcggtgtcaactgcatctcctttcacccatcaggcaattacctgataactgcctcttctgacggtactttaaaaatactggacttgctagagggaaggttgatttatacccttcagggccacacggggcctgtgttcacagtcagcttctctaaggggggtgagctattcgcctcaggcggtgctgatacccaagtgttactgtggaggactaactttgatgaactgcactgtaaaggactgacgaagcggaatctgaagcgactgcattttgactctcctccacacttgctggacatctatcctcgaacgccacatccccacgaagagaaagtggaaacagtggagatcaacccaaagctggaagtgatcgatctccagatcagtacccctcctgtcatggacattctgtcctttgattccacaaccactaccgaaacatccggacgaacactgcccgacaaaggcgaggaggcgtgtggctacttcctgaatccttcactaatgtccccagagtgtctccccaccaccacaaaaaagaaaaccgaggatatgagcgaccttccatgtgaatcccagagaagtatcccattggccgtgacagacgctctggagcacatcatggagcagctgaacgttttgacccagaccgtgtctatcctggagcagaggcttactttaactgaggacaagctcaaagattgtcttgagaaccaacaaaagctcttttcggcagtgcagcagaaaagttag

SEQ ID NO: 31609 - DNA, 597 bp, synthetic construct
  source 1..597: mol_type = other DNA; note = Synthetic coding sequence
atgacattgcgatgcctggaaccaagcggtaatggaggggaagggacccgaagccaatggggcacagctgggtctgccgaggagccatccccacaggctgcacgtcttgccaaggcactcagagagttgggccaaacggggtggtactggggttccatgaccgtaaatgaggctaaggaaaagctgaaagaagccccagaaggtacattccttatcagagacagcagtcatagtgactacttgctgacaatctccgtaaaaacttccgctgggcctaccaacctgcggatagaatatcaggacggcaagtttcgtcttgactcaatcatctgcgtcaagagcaaactaaagcagtttgattctgtcgttcacctcattgactactatgtccagatgtgcaaggacaagagaactgggcctgaagctcctcgaaacgggaccgtccacctctatcttaccaagccactttacacatcagcccctagcctgcagcatctttgcagactcacaatcaataagtgtacaggtgctatctgggggctcccgctcccgacccggctcaaggactatcttgaggaatacaagtttcaggtttag

SEQ ID NO: 31610 - DNA, 597 bp, synthetic construct
  source 1..597: mol_type = other DNA; note = Synthetic coding sequence
atgacattgaggtgtctagagccatccgggaacgggggagaggggacgcggagtcagtgggggactgccggtagtgccgaagagcccagcccccaggcggcacggctggcaaaggcactcagggaactggggcagaccggttggtactggggcagcatgacagttaacgaggccaaggagaaactgaaagaggccccagaaggtacctttttaatcagggactcatcccactctgattatctgctgacaatcagcgtgaaaactagcgccggaccaaccaatctgagaattgaatatcaggacggaaagttccgtctagacagtataatttgcgtgaaatccaagctgaagcagtttgattcagtggtccatctgattgattactatgtccagatgtgtaaggataagcggaccgggccagaagcacctcgcaatggtactgtgcatctgtatttaacaaaaccactgtataccagcgcgccatccctgcaacacctgtgtaggttgaccatcaataaatgcactggagcaatatggggcctccctttacccacacggctgaaggattatctcgaggagtacaaatttcaggtctag

SEQ ID NO: 31611 - DNA, 495 bp, synthetic construct
  source 1..495: mol_type = other DNA; note = Synthetic coding sequence
atgatggagggcaatgggacagagaactcttgttctcgcaccagaggctggctgcagcaagacaatgatgccaagccatggctctggaaattttctaactgcttctcccggccagaacagaccctcccacactccccacagacaaaagagtatatggaaaataagaaagttgccgtcgagctgaaggatgtgccctctcccctccatgccggaagcaagttgttcccagccgtgcccctgcccgatattcgctccctgcagcagcccaagatccaactgtcatcagtgccaaaagtctcatgttgtgctcactgtcctaacgagccttccacatctcccatgcgttttggcggaggaggtggaggatcagggggaacatcaagcctgatccaccccggtgccctgcttgactcccaaagtactcggaccattacctgccaggtgggttcaggcttcgcattccaaagcgcatcctccctacagaacgcaagttag

SEQ ID NO: 31612 - DNA, 855 bp, synthetic construct
  source 1..855: mol_type = other DNA; note = Synthetic coding sequence
atgctgtcggtggtcgagaatgggctagatccgcaggctgcgattccagtgatcaaaaaaaagcttgtgggttctgtgaaggccctgcagaaacagtacgtgagcctggatacagtggtaacttccgaggatggcgatgccaacaccatgtgctcagcgctagaggctgtgtttattcatggactacatgctaagcacattagagcagaggcgggtggcaagcggaagaaaagtgcacatcaaaagcctctgccgcagcccgtcttttggcccttgctcaaggcagtgacgcataagcatatcatctccgaactggaacaccttacgtttgtgaacactgatgtgggcaggtgtcgggcttggctgagattagccctaaacgatggcctcatggaatgttatctaaaattgttactgcaggaacaggccagacttcagctgcagcgtaaggaaagccttgactcaatttcacacagctctggttcagaggacatcgaggttcaccattctgggcataagatccggagaaaccagaagttgacggcctcaagcctctccctcgatacagcatcaagcagccagttgtcctgttcattgaactctgactcctgcttacttcaggaaaatggctccaaatcgcctgaccattgcgaggaaccgatgagctgtgattccgatctaggaactgccaacgccgaggattcagataggagcttacaggacatcaagattttttcttgggcacagtggttgacaccggtgatacccgcactatgggaggccgaggccggtgggagtcaacgacagcagattgaaacgttcctggctaacacagtgaagccccacctgtactag

SEQ ID NO: 31613 - DNA, 3282 bp, synthetic construct
  source 1..3282: mol_type = other DNA; note = Synthetic coding sequence
atgggaggcaaggcttggcccaggcgtgcagtgggcaccgctggcggtccatgcgctgagcagataagcgcaccctttcaaacgttgctcatgccccacctgcctctcgcttcttttagaccacccttctgggggttgagacacagccggggtctgcctcgttttcactctgtgtccactcagagtgagccacacggaagccccatttcgagaagaaaccgagaagccaagcaaaaacgtctgcgtgagaaacaggctaccttggaagccgagatcgcaggagagtcaaaaagccccgctgagagtattaaggcttggaggcctaaagaattggtactttatgagattcctacgaagcctggggagaaaaaggacgtgtctggccctctgccacctgcctacagccctcgatacgttgaggccgcatggtacccatggtgggtgcgtgaaggattttttaagccggagtaccaggccaggctgccccaagctacgggcgaaacattttccatgtgcattcccccacccaatgtgacaggaagtctgcacataggccacgctcttaccgtggccattcaagacgctctcgtaaggtggcataggatgagaggggaccaagtgttgtgggttccagggtccgatcacgctggtatcgccacacaagcggtggtagaaaagcagttgtggaaggaacgcggagtgcggagacacgaactgagccgggaggcttttcttcgcgaagtctggcagtggaaggaagctaaagggggagaaatctgcgagcaactcagagctcttggagcctctctggactgggatcgcgagtgcttcaccatggatgttggatcttcagtggcagttacagaggctttcgtgcgcctctataaggccggacttctgtaccggaaccaccagctggtgaactggtcatgcgctctgcggtccgccatctccgacatcgaggtggaaaatcgaccgctccctggccacacacagcttcgtctccctggttgtcccacgcccgtctcatttggtcttctctttagcgtggcttttccggtcgacggcgaacctgatgctgaggtagtcgtcgggaccacccgacccgagaccttgcctggagatgtggcagtcgccgtgcatccagatgactcacgctatactcatctccacggccgtcagctgcggcatcctctgatgggtcagcctcttccactgattactgactacgctgtgcagccacacgtgggcacgggcgctgtgaaagtgactcctgctcacagtcctgcagatgccgaaatgggcgcaaggcacggactaagtcccctcaacgtgattgcagaagacggcacaatgacctctctgtgcggcgattggctgcagggccttcaccgattcgtcgccagggaaaaaattatgtccgttcttagcgagcggggtcttttccgcggtctgcagaaccatccaatggtgctgcctatctgtagtcggtcaggggacgtgatagaatatcttctaaaaaaccaatggttcgtgagatgccaagaaatgggcgctagagcagccaaggctgttgagagcggcgctctggagttatcccccagctttcaccaaaaaaactggcagcattggttctcccacattggcgactggtgcgtttctcgccagctgtggtggggacaccagattccggcatacctagtggttgaggatcacgctcaaggtgaggaggattgttgggtggtgggcagatccgaggctgaggcccgagaagtggcagctgagcttaccggacggcctggagccgagctcaccctggaacgtgacccagacgtgcttgatacatggttctcttcagccctcttccctttctccgccctgggctggccacaggaaactccagacctcgcacgtttctacccattatccctactggaaactggctccgacctgttgcttttttgggtaggcaggatggtcatgcttgggacacagctgactggacagcttccttttagcaaggtgttattacaccctatggttagggaccgccagggacggaaaatgagcaaatcacttggaaacgtcctcgatccgcgagacataatcagcggggtcgaaatgcagctactccaggaaaagctcagatcgggtaatctggatccagcagaacttgccatagttgccgcagctcaaaaaaaggacttccctcatgggattcctgaatgcggaactgacgcattgaggttcaccttgtgctcccacggagtgcaggcaggcgacctgcacctgtccgtgtccgaagtgcagagctgcaggcatttttgtaacaaaatatggaatgcgctccgcttcatcttaaatgcactgggggagaagttcgtgccgcagcctgccgaagagctgtcgcccagttctcctatggacgcgtggattctgtcccgcctggccctcgcagcccaagaatgcgagagggggttcctcaccagggagctgtctctggtgacgcacgcattacatcatttctggctgcacaacctgtgtgacgtgtacttggaggctgttaaacctgtcctgtggcattccccaagaccactgggcccaccccaggtgctctttagctgcgcggacctgggcctgcgactccttgcccctctcatgccgtttctcgccgaagagttatggcaaagactccctcctcgacccggttgtcccccagctcctagtatctccgttgctccatatccttctgcctgttccctagagcattggcggcagcccgaacttgagaggaggtttagtcgggtgcaggaggttgttcaggtgttgagggcactccgggctacctaccagcttaccaaggctcgaccccgtgtcctgttacagagctcagagccgggagaccaggggctgttcgaagcctttctggagccactagggacccttggttattgcggcgctgtgggattactgccacccggaaccgccgctccaagcgggtgggctcaggctcccctgagtgatactgcccaagtgtacatggagctgcagggactggtggatccccagatccaacttcccctcctcgctgcccgtcgatacaagttgcagaaacaactcgacagcctaacagctagaactccctccgaaggcgaggctgggacccaaagacaacagaagctgagttctcttcagcttgagctttcgaaactcgacaaggccgcaagtcatctccgacagctgatggacgaaccccctgctcccggttcaccggaattatag

SEQ ID NO: 31614 - DNA, 3621 bp, synthetic construct
  source 1..3621: mol_type = other DNA; note = Synthetic coding sequence
atgacatctgccgcagagatcaagaaaccgcctgtggccccaaaacctaaattcgtagtggccaacaacaagcccgctccaccacccattgcccctaagcccgacatagtcatctcgtccgtgcctcaaagcacaaagaaaatgaagccagccatcgccccaaagcctaaggtgctcaaaacttcccctgttagagagattgggcaatccccctcccgcaagatcatgctcaatctggaaggccacaagcaggagcttgctgaatctaccgacaatttcaactgcaaatatgaaggcaaccagagcaatgattacatctctcccatgtgttcttgttcttcagagtgtatccataaactgggccaccgggaaaacctctgcgtcaaacagcttgtcctcgaaccgttagagatgaacgagaatctggaaaactctaagattgacgagacactaacaatcaaaactagatcaaagtgcgatctctatggcgaaaaggcaaaaaaccagggaggggttgtgctgaaggcctcagtgcttgaagaagaattgaaggacgcacttatccaccagatgcccccatttatctcagcacagaaacaccgcccaactgattctccagaaatgaacgggggatgtaactcaaatggtcaattccgcatcgaatttgccgatctctctccgtctccatcttcattcgagaaagtgcctgaccaccactcttgccacctgcaactgccttctgatgagtgcgagcattttgagacatgtcaagacgattcagagaagtctaataattgcttccagagctcagagctggaagcactggagaacgggaagaggtccacgctgattagcagcgacggagttagcaagaaaagtgaggtgaaagacttggggcctctggagatccacctggtcccttatacacctaaattccccacccccaagccacgaaagacacgtaccgccagactgttaaggcaaaaatgcgtggatacgccaagcgaatcgaccgaagaaccgggtaacagcgactcatcatcgtcctgcctaaccgaaaattcactgaaaattaataagataagcgtgttacaccagaatgttttgtgtaagcaggaacaggtggacaagatgaagctggggaacaagtcagagctaaacatggaaagcaattctgatgctcaggacctggtgaacagccagaaggccatgtgcaacgaaacaactagttttgaaaagatggccccttcatttgataaagactctaacctcagcagtgatagcacgactgtagatggaagctcaatgagtctagctgttgacgaaggaactgggttcattcgctgcacagttagtatgagcctgcctaagcagcttaagcttacatgtaatgagcacctgcagagcggtcgaaacctgggagtatcagccccacaaatgcagaaggaatctgtcataaaagaggagaactctcttcgaattgtgcctaaaaaaccccaacgacacagtctccctgcaactggggtgttgaagaaagccgcatccgaggaactgctcgagaagtctagctatccctcttccgaggagaaatctagcgaaaaatctctcgaacgtaaccacttgcagcacctgtgtgctcaaaaccgaggcgtgtctagctcattcgacatgcccaaaagggcctctgagaaacctgtgtggaagttgccgcacccaattctacccttcagtggcaaccccgaatttctcaagtccgtgaccgtgagcagtaacagtgaacccagtacagccctcacgaagcccagagctaagtcactgagcgccatggacgtagagaaatgcacaaaaccctgcaaggatagtactaagaagaattccttcaaaaaattattgtcgatgaagctcagtatttgcttcatgaagtccgacttccagaagttttggagtaagagcagtcagctgggtgatactacaaccggccacctgagcagtggggaacagaagggaattgaatccgattggcagggcctgttagtgggtgaagaaaagaggtctaaaccgatcaaggcttactcgaccgaaaattacagtctggaaagtcagaagaagaggaaaaagagcagaggccagacatctgcagcaaatggactgagggcagagtcgctcgacgatcagatgttgtccagagagtcatcttctcaggcgccttacaagagcgtgacctcgctgtgtgcgcctgagtatgagaatatccggcactacgaggagatcccagaatatgaaaacttgccttttatcatggcgatccgaaaaacacaggagctagagtggcagaactcttcaagtatggaggatgcggatgccaacgtgtacgaagtcgaggagccatacgaggcgcctgacggacaactgcagttgggcccacgccaccaacactcctcatcgggggcaagccaggaagagcaaaatgacctgggcctgggcgatcttccctcagacgaggaagagatcatcaactcatcagacgaagacgatgtcagttcagaatcttccaagggtgaaccagacccactggaggacaagcaggatgaggataatggcatgaaatcaaaggttcaccacatcgccaaagaaatcatgtcttcagaaaaagtatttgttgatgtgctcaagctactgcatattgactttagagatgctgtggctcacgcgtctaggcagcttggcaagccagttattgaagacagaattctgaaccaaatcctatactatctccctcagctctatgaacttaatcgcgatttactcaaggaactggaggagcgcatgctccattggaccgagcagcaacgtatagcggatatctttgttaagaaaggtccctatctgaaaatgtacagcacctacataaaggagttcgacaagaacatcgccctgctggacgagcaatgcaagaagaaccctgggttcgcagctgtggtgcgggaattcgagatgtcaccaaggtgtgcaaacctggccctgaaacattatttgttgaagcccgtgcagaggataccgcagtatcgcttgcttctcacagactacctaaaaaatttgatcgaggatgccggtgactacagagatacccaagacgccctggctgtggtcatcgaggttgccaatcatgcaaacgataccatgaagcaaggagacaactttcaaaagctcatgcagatccagtacagtctgaatggtcatcatgaaattgtccagcctggtagagtcttcctgaaggagggaatcctaatgaaactatccagaaaggtcatgcagccacggatgttctttctctttaacgatgccctgttgtacaccactcccgtccagagcggaatgtataaactaaataatatgctgtctctcgccggtatgaaggtccggaagcccactcaggaagcctatcagaatgagttaaaaatcgaatctgtggaaagaagcttcatcttgagcgcctcttccgcaaccgagcgcgacgaatggctggaggcaatctctagagcaattgaggaatatgcaaagaagagaatcaccttttgtccttcacgaagcttggatgaggcagattctgagaacaagtag

SEQ ID NO: 31615 - DNA, 435 bp, synthetic construct
  source 1..435: mol_type = other DNA; note = Synthetic coding sequence
atggacaaggacagtcaaggcctcctagactcctctctcatggcttctggcaccgcctcccggtctgaagatgaggaatccctcgccggacaaaagcgcgcatctagtcaggccttagggaccataccaaaaaggcgcagctcatcacggacgctctatcgttttatcaaacgcaagaagtttgacgacgaactcgtcgagtcgagtctagcaaaatcatctactcgggctaagggagccagtggagtcgagcccggacggtgctctggcagtgaaccaagctcctctgaaaaaaagaaagtatcaaaggccccttcaacacccgtgccaccatcgcctgcccctgctccgggtctcacgaagcgcgttaaaaaatctaaacagcctcttcaagtgacaaaggacctcggcagatggaagcctgctgatgattag

SEQ ID NO: 31616 - DNA, 810 bp, synthetic construct
  source 1..810: mol_type = other DNA; note = Synthetic coding sequence
atgaaaacgccagtggagctggccgtttctggaatgcagaccctgggtctgcagcacaggtgtagggggggatatagagtgaaggcgcgaacgagctacgtagatgagaccttatttgggagcccagcaggcaccagaccaactcctcccgatttcgacccaccctgggtggagaaggcgaacaggacaagaggagtaggcaaagaagccagcaaggcactgggcgctaagggttcgtgcgaaacaactcctagccggggatcaaccccaaccctaacccccagaaaaaagaacaaatatagacctatatcccacaccccatcttactgcgacgaatctttgttcgggagcaggtctgagggcgctagctttggcgctccgcgtatggccaagggtgatgcagctaaactacgagctctcctctggacaccccctcccaccccacgtggaagtcattcacctcgtcccagagaggctcccttgcgcgctattcatccggcaggcccttccaaaaccgagccgggacctgcggcagatagtcagaagctcagcatgggcggattacactcgtcacggccactgaaaagaggcctctctcattctctcactcacctgaatgtgcccagtaccggacaccctgctacctcagccccacatacaaatggcccacaggatttgcgtccctccacctctggggtgacttttcgctcgccgctggttacttcacgtgccaggtccgtctctattagtgtgccctcaaccccccgtcgagggggtgcaactcagaaacctaagccaccctggaaatag

SEQ ID NO: 31617 - DNA, 501 bp, synthetic construct
  source 1..501: mol_type = other DNA; note = Synthetic coding sequence
atggctaatgatccgttggagggcttccacgaggtcaatctcgctagccccacgtcccccgaccttctgggtgtctatgaatctggcactcaagagcagacaacatccccttcggtgatatatagaccccacccatctgctctgtccagtgttcccatacaggcgaatgcgctggatgtgagcgaacttccaacccagccggtttactcatccccgcgtagactgaactgtgccgaaatctcaagcatttcctttcacgtgacagatcctgccccttgcagcactagcggagttacggccggacttaccaaactgacaaccagaaaagacaactacaatgcggagcgcgaatttctacagggcgcaactattacagaggcctgtgatggatctgacgatatctttgggttgtccaccgatagcctgtctcgactgaggagcccgagcgtgcttgaggtccgggaaaaggggtacgaaaggctcaaagaagaactagcttag

SEQ ID NO: 31618 - DNA, 390 bp, synthetic construct
  source 1..390: mol_type = other DNA; note = Synthetic coding sequence
atggacacaatgatgctcaacgttagaaatctatttgagcagctcgttaggcgagtggagatcctgagtgagggaaacgaagttcagttcatccagctggccaaggacttcgaggacttccgcaagaagtggcaacgcacagaccacgagctggggaagtacaaggatctcctcatgaaggctgaaactgaacgcagcgctctggatgtcaagctgaaacatgcgaggaatcaagtggacgtggaaattaagagacgccagagagccgaggctgactgcgagaagttggaaagacagattcagttaattagggaaatgctcatgtgtgacaccagtggcagcatccagctctctgaagaacaaaagagcgccctcgcattcctcaactag

SEQ ID NO: 31619 - DNA, 486 bp, synthetic construct
  source 1..486: mol_type = other DNA; note = Synthetic coding sequence
atgacactccggtgcttggaacctagcggcaacggcggtgaaggcacacgtagccagtggggcactgcgggaagtgccgaggagccttccccccaagcagcacgcttggcaaaggccttaagagaactgggtcagactggctggtactggggttccatgacggtgaatgaggcaaaggagaagctaaaggaagcacccgaagggacctttctgattagggacagtagtcactccgactacctgctgaccatcagcgtcaagactagcgccggacccacgaatcttcgcatcgagtaccaggacggaaagttccgcctggactcaattatctgtgtgaagtccaaacttaagcagttcgactcagtcgtccacttgatcgattattacgtgcaaatgtgtaaggacaaacgcaccggccctgaggccccacggaacggcacggtccacctgtacctgaccaaacccctttatacctccgctccctag

SEQ ID NO: 31620 - DNA, 1389 bp, synthetic construct
  source 1..1389: mol_type = other DNA; note = Synthetic coding sequence
atggataaggactcccaggggctcctcgattctagcttgatggctagtgggaccgcgtctcgatccgaggacgaggagagcctcgccggacaaaaaagggcctcatcacaggcactgggtacgattcctaaaaggaggtctagctctagatttattaagcgcaagaaattcgatgatgaattagtggagtccagcttagccaagagctctacgagagctaaaggcgcatctggagtggaacctggccgatgctccgggtcagaacctagcagcagtgaaaaaaaaaaagtgagcaaagccccaagcactccggtcccaccgtccccagctccagcaccaggcctcactaagagggtcaagaaatcaaagcagcctctccaggttaccaaggacctcggcaggtggaaacctgctgacgatctcctcctgatcaatgctgttctgcagaccaatgacctcacatctgttcacctgggagtcaagttctcctgccggtttacgttaagggaggttcaggaaaggtggtacgccctgttgtatgaccctgtcattagcaaattagcttgccaagccatgagacagttgcatccggaggctatcgcggcaatacagtctaaggctctgttctctaaggcagaggaacagctcctgtctaaagtagggtcgacctcccaaccgacccttgaaacgttccaggatctgctgcataggcaccctgacgctttctacctcgctcggacagctaaagcactgcaggcgcactggcagctgatgaaacagtattacctgctggaggatcagactgttcagcccctgcctaagggcgaccaagtactgaatttctctgacgccgaagacctcatcgatgactccaaactcaaagacatgcgagatgaggttcttgaacatgaactgatggttgcagatcgacgccagaagcgcgaaataagacaacttgagcaggagctgcacaagtggcaggtgctggtcgatagcatcacggggatgtcttccccagatttcgataatcagactctggctgtgctgcgcggtcggatggtgcgatacctcatgcgctcccgcgaaataactctgggcagggccacaaaggacaatcaaatcgatgtcgacctgtcgctcgagggtcccgcatggaaaatttcgcgaaagcagggggtaatcaagcttaaaaataatggagacttctttatcgctaacgaggggaggcgtcccatctacatagacggaaggcccgtgctgtgcgggagcaaatggaggctcagtaataacagtgttgtggaaatcgccagcctcagatttgtctttctcattaaccaggacctgatcgctctgatcagagctgaggctgccaagatcacccctcagtag

SEQ ID NO: 31621 - DNA, 576 bp, synthetic construct
  source 1..576: mol_type = other DNA; note = Synthetic coding sequence
atggggaagaaaaccaagaggacagccgattccagcagtagcgaggatgaggaagaatatgtggtcgagaaggtgctggaccgcagggtggtgaaggggcaggtcgaatacctgctcaaatggaagggcttttcagaggagcataacacctgggaacctgagaagaacctggactgtccggaactcatctcagagtttatgaaaaagtacaagaaaatgaaagagggagagaacaataaaccccgtgaaaagtccgaaagcaataaaaggaaaagtaatttctctaacagcgccgatgacatcaaatctaaaaaaaaaagagaacagagcaatgatattgctcgtggctttgagcgtggattggagcccgagaaaattatcggtgccactgattcctgtggtgacctgatgtttctaatgaagtggaaagatacagatgaggcagatctggtcctagccaaagaagcgaacgtgaagtgccctcagatagtgattgccttctacgaggaacggctcacgtggcatgcgtaccctgaagacgccgagaacaaagagaaggagacagcgaagtcttag

SEQ ID NO: 31622 - DNA, 1212 bp, synthetic construct
  source 1..1212: mol_type = other DNA; note = Synthetic coding sequence
atggcctcttcatcagtaccgcctgccaccgtctctgcggctacggcagggcctgggcctggcttcggcttcgcatctaaaacaaagaagaagcactttgtacaacagaaagtgaaagtgttcagagccgctgaccctctggtgggcgtgtttctctggggggtggcacactctataaatgagctgagccaagtgcccccacctgtgatgttactcccggatgactttaaggcgagctcgaagattaaagaatactgtcctcaggtgttcagaaaccttcgtgataggttcggcattgacgaccaggactacctggtgtcgcttacgagaaatcccccttccgaaagcgagggctctgatggcagatttctgatcagctatgatagaacactagtgataaaggaagtgagtagcgaggacatagctgatatgcactctaacctgagtaactaccaccaatacattgtcaaatgccacggtaacactctcctgccccagttcctggggatgtaccgcgtttctgtggacaatgaggatagttacatgctcgtaatgcgtaacatgttctctcatcgccttcctgtgcaccggaaatatgatctaaaaggctcgctcgtctctagagaggctagcgataaagagaaggttaaggagctacccacgctcaaagatatggatttccttaataaaaatcagaaggtttatatcggcgaagaggagaagaagatttttttagagaagctcaagagagacgtcgaatttctagttcagttgaagatcatggactatagtttactgcttgggatccacgatatcattagaggttccgagcctgaagaagaagctcccgtcagggaagacgagtcagaagtggacggtgactgctcccttacaggacccccagcactcgtggggtcctatggcaccagtcccgaaggcattggcggttacatccactcccacaggcccctaggccctggggaatttgaatcatttattgacgtgtatgccattaggtccgccgagggggcaccgcagaaggaggtgtattttatgggactgatcgacatcctaactcaatacgacgccaagaagaaggccgctcatgccgctaaaactgtgaaacatggcgctggcgcagaaattagtacagtgcatcctgaacaatatgccaagcggtttttggatttcataacaaacatatttgcgtag

SEQ ID NO: 31623 - DNA, 576 bp, synthetic construct
  source 1..576: mol_type = other DNA; note = Synthetic coding sequence
aaaatcgaagtcatcgaaattatgacagaccggggtagtggaaagaagaggggctttgcctttgtgaccttcgatgatcacgactccgtcgataagatagtgatacagaaataccacacagttaatggccacaactgcgaagtgaggaaggctttgagcaagcaagagatggcttccgcctcctcatctcagaggggcagaagcgggtccggaaatttcggcggaggcaggggcggtgggttcggcggaaatgataacttcggacggggaggaaacttcagcggcaggggaggcttcggtggctcaagaggaggcggagggtacgggggtagtggtgacggatacaatggatttggaaacgacgggtctaatttcggcggagggggatcatacaacgactttgggaattacaataaccagtcttccaactttggtccaatgaaaggtggtaatttcggcggtcgttcttccggcccatacgggggtggtgggcagtacttcgctaaacccagaaatcagggaggatacggagggtcaagcagttccagctcctacggaagcggtagacgtttctag

SEQ ID NO: 31624 - DNA, 543 bp, synthetic construct
  source 1..543: mol_type = other DNA; note = Synthetic coding sequence
atggaactaacaatcttcatccttaggctggcgatatacattttaacttttccgctgtatctcctgaacttcctcgggctctggtcctggatatgcaagaaatggttcccgtattttctcgtgaggttcacagtaatctacaatgaacagatggccagcaagaagagagagctctttagcaacttgcaggagtttgccggtccctcaggaaagctttctcttttggaggtgggctgcggcacaggcgctaattttaaattttatcctcctggttgccgtgtcacctgtatagacccaaatcctaattttgagaagtttcttatcaaatctatcgctgagaaccggcatctccaatttgaaagatttgtcgtggcggctggtgagaacatgcaccaggtggccgacgggtcagtcgacgttgttgtgtgcactttggttctttgctccgttaagaatcaggagagaattctgagagaggtttgccgggtgctcaggcctgggggagccttctattttatggaacatgtggctgctgagtgctag

SEQ ID NO: 31625 - DNA, 1431 bp, synthetic construct
  source 1..1431: mol_type = other DNA; note = Synthetic coding sequence
atgggactaaagaagatgaagggcctgagctacgatgaggccttcgctatggcaaacgaccccttggaaggttttcacgaggtgaacctcgcctctcccacctcgcccgatctgttgggagtttacgagtcaggtacacaagagcagaccacaagcccctcagtgatatatagaccgcatccctcagctttatcaagtgtcccaattcaggccaatgctctggatgtgagcgagttacctacccagccggtttactcatctccgagaagactcaattgtgccgagatcagcagtatttcattccacgttaccgaccccgctccctgtagcacttcgggcgtgacggctggactgaccaagctgacaactcgcaaggacaactacaatgccgaaagggagttcctgcaaggggcaaccatcactgaggcttgtgacgggtcagacgatatttttgggctgagcaccgacagtttaagccggctgcgcagccctagcgtcctggaggtccgagagaaaggctacgaaaggctgaaggaggaactcgcaaaggctcagcgcgaactgaagttaaaagatgaggagtgtgaacgcctctctaaggttcgggaccagcttggacaggagttggaggaactaactgcatcactgtttgaggaggctcacaaaatggtgcgcgaagcgaatatcaaacaggcgacggccgagaagcagttgaaagaggcacaggggaagatagacgttctgcaggccgaggtcgcagcattgaagactcttgttcttagctcctcaccaacaagcccaacacaggagcccctccccggaggtaaaacaccattcaagaagggacacactcgaaataaaagtacttcttctgccatgtctggctcacaccaggacttaagtgtgattcagcctatcgtgaaagactgtaaggaagctgacctaagtctctacaacgagtttcgactatggaaggatgaaccaacaatggaccgtacatgtccattcttggacaaaatctaccaggaagacattttcccgtgtctgaccttctccaaatccgagctcgccagcgctgtgcttgaggcagtcgaaaacaacacgctgtccattgaacccgtaggcttgcagcccatccgctttgtgaaagcatccgccgtcgaatgtggcggaccaaagaagtgtgccctgacaggtcaatcaaagtcttgtaaacacaggatcaagctgggggatagctctaactactactacatcagtcctttctgcaggtataggataacctccgtttgtaatttctttacttacattcgttacatccagcagggccttgtgaaacagcaagacgtggatcaaatgttttgggaagtgatgcaactccggaaggagatgagtctggctaaactcggatactttaaagaggaactgtag

SEQ ID NO: 31626 - DNA, 336 bp, synthetic construct
  source 1..336: mol_type = other DNA; note = Synthetic coding sequence
atggatacaatgatgctcaatgtgcgcaatttatttgaacagctcgtgcgtcgggtggaaatcctctccgaaggtaatgaagtgcagtttatccagttggctaaggacttcgaggattttcggaaaaaatggcagcgtacggaccacgaattgggtaaatacaaggacctcttaatgaaagccgagactgaaaggtccgcacttgatgtgaaattaaaacatgcaagaaatcaggtggatgtggagataaagcgtcgacaacgcgctgaagccgactgtgagaaacttgagcgtcaaattcaattgatcagggagatgctgatgtgtgacacgtag

SEQ ID NO: 31627 - DNA, 324 bp, synthetic construct
  source 1..324: mol_type = other DNA; note = Synthetic coding sequence
atgataaagaacttagaagtgcagcttcgaagggccaccgacgagatgaaggcctatatctcctccgaccagcaggagaagagaaaagccatcagggagcagtacaccaaaaacaccgccgagcaggaaaacctgggtaagaagctgagagaaaagcagaaggttattcgtgagtcccatggaccgaatatgaagcaggccaaaatgtggagggacctagagcagctgatggagtgcaagaagcagtgcttcctgaaacaacaatcacaaacaagtatcggtcaggttattcaagagggcggtgaggaccgcctgatactgtag

SEQ ID NO: 31628 - DNA, 2772 bp, synthetic construct
  source 1..2772: mol_type = other DNA; note = Synthetic coding sequence
atgtgcatcccccctccaaacgtgactggctctcttcatattggtcatgccttgaccgtggctattcaagatgccctggtgcgctggcataggatgcgaggcgaccaagtattatgggtcccaggaagcgaccacgccggtatcgccactcaggcagtcgtggaaaaacaactgtggaaagagagaggagtgcgccgacatgagctaagccgggaggcttttctgagagaagtgtggcaatggaaggaagccaagggtggggagatctgcgagcaactgcgagccctgggggcatctctggattgggatcgcgagtgcttcaccatggatgtgggctcgagcgttgctgtgaccgaggccttcgtgcgtctgtataaagcaggcctgttgtatcggaaccatcaacttgttaattggtcctgcgcacttcggtcagcaatctccgacatagaagtcgaaaatcgcccacttcctggccacacccaattgcgactcccagggtgccccacacctgtgtcctttggtctgttattctcggtcgcattccccgtggatggtgaaccagatgctgaggtcgtggtagggactactcgtcccgagactctacctggcgatgtggccgttgccgtccaccctgatgacagtcgctacacgcacctgcacgggcgtcaactccgccacccattgatggggcaaccgctcccattgattacagactacgcggtccagccccacgtgggaactggggctgtgaaagtgacgccagcgcactcccccgcagatgcagaaatgggagctcgccacggattaagccctctgaatgtcatcgcagaagacggaacaatgacatcactttgcggggactggctgcagggacttcacagatttgtggcccgagagaaaatcatgtctgtattatctgagcgaggtctgttccgcggactgcagaatcatccgatggtgctgcctatctgttctcgcagcggcgacgtgatcgaatatttgcttaaaaatcagtggttcgtgaggtgccaggaaatgggggcaagggcggcaaaagccgtagagagcggtgccttggagctgagcccttcctttcaccagaaaaattggcagcactggttctctcacattggagattggtgtgtgtctcgtcagctgtggtggggtcaccagattcccgcttatctagttgttgaagaccacgcccagggggaggaggactgttgggtggtgggcaggtctgaggccgaggcccgagaggtggccgctgaactgaccggcaggccgggagcagaacttaccctggagagggatccggatgtcctggatacgtggttcagcagtgcgctgttcccgttcagtgccctaggctggccacaggaaacacctgaccttgcgagattttatccacttagcctcctggagacagggagcgatctgctactgttttgggtggggaggatggtgatgctggggacacagctgacaggccaattaccatttagcaaagtgcttctacatccaatggtgcgagacagacagggtagaaagatgtcaaagtcgctgggcaacgttttggatcctagggacatcattagtggcgtcgagatgcagctgttacaggaaaaacttaggagtgggaacctagatcccgctgagttggccatcgtcgcagccgcacagaagaaggacttcccacacggaatcccagagtgcgggacagatgcgttaagatttacactgtgttcccacggcgtgcaggctggtgacctgcacctttcagtgtccgaggtccaatcttgccgccacttctgtaataagatctggaacgccctgagattcattctgaacgccctgggcgaaaaattcgtgccacaacctgccgaagaactttccccatcaagtcccatggacgcttggatacttagtaggcttgccctcgcagctcaggaatgcgagaggggcttcctgaccagagaattatcactggtcacacatgcactccatcacttctggctccataatctgtgcgacgtctacctcgaagctgtgaagcctgtgctttggcattcgcctaggcctctcgggcctcctcaggtgctgttcagctgcgccgatctaggtctccgactcctagctccactgatgccattcctggccgaagaattgtggcagcgcttgccacctcgacctggctgcccccctgccccttcaatctccgtggcaccatatccgagtgcctgttcactagagcattggagacagcccgagctcgagagacgctttagcagggtgcaggaggtggtgcaggtgctaagagccttacgtgcgacctaccagttaacaaaagcacgcccacgggtactgctgcaaagctccgaaccaggagaccagggcctgtttgaggctttcttggaacccctgggaacccttggatattgcggcgcagtaggactcctgcctcccggtacagcagccccaagcggctgggcacaggcaccacttagcgatacagcacaagtgtacatggaactgcaagggctcgttgatccgcagatacaactgccactcttggccgcacgaagatacaagctgcagaaacagctggatagcttgactgcccgtacaccaagcgagggggaagcgggaacacagagacagcagaagctgtccagcctccagctggagctgagcaaactcgacaaagcggcatctcatctgaggcagctcatggacgagcccccagctcctggatcacccgaattatag

SEQ ID NO: 31629 - DNA, 2076 bp, synthetic construct
  source 1..2076: mol_type = other DNA; note = Synthetic coding sequence
atggaggagagccccctcagcagggcacccagccgcggtggcgtcaacttcctgaacgtggcccgaacatatattcctaacacaaaagtggagtgtcactatactctacccccaggcactatgccttctgcctccgattggataggaattttcaaggtcgaggctgcttgtgttcgcgattaccacactttcgtgtggtctagcgtgcccgagtctaccacagatggaagtcccatccacacaagcgtccaattccaggcaagttaccttcctaagcccggagcgcagttgtatcagtttcgttatgtgaaccggcaaggacaagtgtgtgggcagagtcctccctttcagtttcgggaacctagacccatggatgagctggtcactctggaggaggcagatgggggaagtgacattcttctcgtggttcccaaggctactgtcctgcaaaatcaactggatgagtctcagcaggagcgcaatgacctaatgcagctcaaacttcagctggaaggccaagtcaccgaattgcgaagccgcgtccaggaattggagagggcgttagcaaccgccagacaggagcatacggaacttatggagcaatacaaaggaatctctaggagtcatggagaaatcaccgaggagcgggacatcctgtcccggcagcagggggaccacgtcgcaaggattttggagcttgaggacgatatccagactatctcagaaaaggtcttaaccaaagaggtcgaattggataggctcagagacaccgtcaaggctctgacccgggaacaagagaagttgctcggacagttaaaggaggtacaggccgacaaggagcagtccgaagccgagctgcaggtcgcccaacaggagaaccaccacctgaacttggatctgaaggaggccaagtcgtggcaagaagaacagagtgcacaggcgcagaggttaaaagacaaggtagcacagatgaaggataccctgggtcaggcacagcagcgagtggcagagctcgagcccctgaaagagcagcttcggggagcgcaggaactagcagcgtcttctcagcaaaaagccaccctcctgggagaggagttagcctctgctgcagcagcacgtgatagaacaatcgcagagctccatcgcagtagactggaagtcgctgaggtgaacgggaggctagcagagctaggccttcacttgaaagaggaaaaatgtcagtggagcaaggagcgggctgggctgcttcagagtgtggaagctgagaaggacaaaattctaaaactcagcgccgaaatactcaggctggagaaggcggtgcaggaagagcggacacagaaccaagtatttaaaactgagttagcacgggaaaaggattcctctctggtgcagttgagcgagtcaaaacgggagttgacggagcttcgaagcgcactgagggtactgcagaaagaaaaggaacagctgcaggaagagaaacaggagttgctcgagtacatgagaaaactcgaggcccgtctcgagaaggttgctgacgagaagtggaatgaagatgccaccaccgaggacgaagaggcagcagtggggctctcatgcccggctgccctgactgactcagaggacgaaagccccgaggatatgcgcttgccaccctacggtttgtgtgaaaggggcgaccccggatcatctcctgccggtccacgagaagcatctcctctggtggttatttctcaacccgcacctatttcgccacatctttccggaccagcagaggattcatcctccgattcagaggctgaagacgagaaaagcgtgctgatggcagctgtccagagcgggggtgaagaagctaatctcctgttgcctgaactgggctcagcgttttatgatatggccagcggcttcactgttgggacactctccgaaacctcaacaggcggacctgctacccccacctggaaggaatgccctatctgcaaggagagatttccagccgaatccgacaaagacgccctggaggaccacatggatggccactttttcttttctacccaggatccttttacctttgagtag

SEQ ID NO: 31630 - DNA, 366 bp, synthetic construct
  source 1..366: mol_type = other DNA; note = Synthetic coding sequence
atgaacgaatcaaagccaggcgactcacagaatctcgcatgtgtgttctgtagaaagcacgacgactgccctaataagtacggcgagaaaaaaactaaggagaagtggaacctgacagtccactactattgcctcctaatgagttcaggtatctggcagcggggtaaggaagaagagggcgtttacggattcctaatcgaagacatccgtaaggaagtgaatcgggcatccaagcttaaatgctgcgtgtgcaaaaagaacggcgcttccatcggctgcgtagcacccagatgtaaaaggtcctaccatttcccctgtggcttgcaacgcgaatgcattttccagtttaccggaaattttgcatag

SEQ ID NO: 31631 - DNA, 657 bp, synthetic construct
  source 1..657: mol_type = other DNA; note = Synthetic coding sequence
atgaattgtcggtccgaggtcctggaggtttctgttgagggcagacaagtggaagaggcaatgcttgcagtcttgcataccgtcctgctccacagatctaccgggaaatttcactacaaaaaagagggaacttacagcatcggaacagtgggtacccaggacgtcgattgcgacttcatcgacttcacttacgtgagggtatctagcgaggagctcgatcgcgctctgcgtaaggtggtgggcgaattcaaggacgcactcaggaactcggggggagacggtctcggccaaatgagtctagaattttaccagaaaaagaagtcgaggtggccttttagcgatgagtgtatcccttgggaagtctggaccgtgaaagtgcacgtagtcgcgttggccactgagcaggaaaggcaaatatgccgggagaaggtgggcgagaaactctgcgaaaaaatcattaatatcgtggaagtcatgaatagacatgagtatttaccaaagatgcccactcaatccgaagtggataatgtttttgataccggcctgcgggatgtccagccttacctctacaagatcagcttccagataacagatgccctgggtacatcagtcactacgacaatgcgccgtctgatcaaggacacactcgccctgtag

SEQ ID NO: 31632 - DNA, 1899 bp, synthetic construct
  source 1..1899: mol_type = other DNA; note = Synthetic coding sequence
atggacacgatgatgctgaacgtgcgcaacctgttcgaacagctggttcggagggtggagatcctatctgaaggcaatgaggtacaattcatacagcttgccaaagactttgaagattttcggaaaaagtggcagcgaacggaccacgagctgggtaaatacaaggatctactgatgaaggcagaaacagagagaagcgcattggatgtgaaactgaaacatgcaagaaaccaagttgacgtggagatcaaacgaagacagagggccgaggccgattgcgagaagctggagcgtcagattcagctaattcgcgagatgctgatgtgcgacacatctgggtccatccagctgagcgaggaacagaaaagtgcactggctttccttaacagaggacaaccctcctcctcaaacgctggcaataaacggctctcgaccatcgacgaatctgggagcattctgtccgacatcagcttcgacaaaaccgatgagtctctggattgggattcatctcttgtgaaaacgttcaagcttaaaaagagggaaaagcggcgaagcacgtctcggcagttcgtcgacggaccccctgggccagttaaaaaaacacggtccatcggcagtgccgtggatcaggggaacgaaagtatcgtggctaaaacgactgtgactgtgcctaatgatggaggaccaattgaagcagtctccactattgaaacagtgccttactggactaggagcagacgcaaaacaggaacactccaaccttggaactcagactcaacattaaattctagacagctggagccccgtaccgagaccgatagtgtgggaaccccgcagtccaatggaggcatgcgcctacacgactttgtaagcaaaacagtgatcaaacctgaatcgtgcgtgccctgcggaaaacgaattaaatttgggaagctgagcctgaagtgtagggattgtagggtggtctcccatccagaatgcagggacaggtgtcccctcccctgtatcccaaccctgatcggaacccctgttaagatcggagagggcatgctcgcagacttcgtgagccagacctctcccatgattccttcaattgtggtgcactgtgtgaacgaaatcgagcagagaggtctgacagaaaccgggctgtaccggatatcaggatgtgacagaactgtcaaggagttgaaggagaaatttctgcgggttaaaactgtacctcttctgagcaaagttgacgacatccatgccatctgcagcttgttgaaggattttttgagaaatctgaaggagcctctgctcacattcaggttgaatagggctttcatggaagcggcagaaatcacggacgaagacaactccatcgccgctatgtatcaggcggtgggggagctcccgcaggcgaacagggacacattggcttttcttatgattcatctgcaacgggttgcccaatctccccataccaagatggatgtagctaacctggctaaagtgtttgggccaactatcgtagctcatgctgtcccaaacccagaccctgtgacgatgctgcaggatattaagaggcaaccgaaggtggtggaacggttgctttcactccctctagaatactggagccaattcatgatggtggagcaggaaaacatagaccctcttcatgtgattgaaaactccaatgcattctccaccccacagacgcccgatattaaagtgtccctgctgggaccagtgacgaccccagagcatcaactgctgaagacaccatcttcatccagcctgtctcagcgcgtgcggagtactctcaccaaaaacacaccccgatttgggtctaagagtaaatccgcaacaaaccttggcaggcagggcaatttcttcgcatcccccatgctgaagtag

SEQ ID NO: 31633 - DNA, 1134 bp, synthetic construct
  source 1..1134: mol_type = other DNA; note = Synthetic coding sequence
atggcaacgatccctgattggaaactgcagctactggcccgacgcagacaggaggaagcgagcgtcaggggtagagaaaaggcggaaagggaacgactgtcccaaatgccggcttggaaaagggggctcctagagcggaggagagccaagctggggctcagcccaggtgaacctagtcccgtgttaggtactgtggaagcgggacccccagacccagacgaatccgccgtgctgttggaggctatcggtcccgtgcaccagaatcgatttattcgacaggaacgccagcaacagcagcaacagcagcagcggtcagaggagcttctggctgaaagaaagccagggccactcgaggctcgcgaacgcaggccgtccccaggggagatgcgagaccagtctccgaaggggagggagtctcgtgaggagcgcctgagcccccgtgagacgagagagcgcaggctggggatcgggggtgcacaggagctctcattaaggccactggaggcacgagattggaggcagagcccgggagaggtgggcgatagatccagcaggctgagtgaagcctggaagtggcggctgtccccaggggagacacctgagaggagccttaggctggctgaaagtagggagcagtctcctcgcaggaaggaggttgaatcgaggctttccccaggggagagtgcctaccagaagttaggactgaccgaagcacacaagtggcggccagactcaagggagagccaggagcagtctcttgttcagctggaagccacagagtggcgcctgcggtcaggagaggagcgtcaggattactcggaggagtgtgggaggaaggaagagtggccagttccaggggtcgcgcctaaggagaccgcagaactcagcgagaccctgacaagggaagctcagggcaacagttccgccggtgtggaagcagctgagcagagacccgtagaagatggcgagagaggaatgaagcctaccgaaggctggaagtggacactgattatgtctctcgcagggaaagggaatcaacatcttgtcacatgcttccctcacccagtttccggaggccgtgcaaattgtccaatcagcaccctgattcaatctccctggtgcggttggggctag

SEQ ID NO: 31634 - DNA, 1134 bp, synthetic construct
  source 1..1134: mol_type = other DNA; note = Synthetic coding sequence
atggcaactatccctgactggaagttgcagttgctcgccagaaggaggcaggaagaagccagcgtgagggggagggagaaagcggagagagaaaggttgagccagatgcctgcttggaagcggggtttgctggaacgaaggcgcgcaaaattaggtttgagccctggcgaacctagccctgtgttgggtacggttgaggccggtcctcccgacccagatgaatctgccgtgctgctggaggccatcgggcctgtgcatcagaacagatttatacgccaagaaagacagcagcagcagcagcagcagcagagatctgaagagttgctggccgaaaggaagccaggcccacttgaggcaagagagcgacggccttcaccgggagaaatgagggatcagagccccaaagggagggaatcccgcgaggagcggttgtctccacgcgagaccagagaacgaagactaggcatcggtggagcccaggagttgtctctgagaccattggaagcacgcgattggcgccagagtcctggcgaggtgggcgatcgttcttctcggctctcggaagcatggaagtggcggctgagtcccggagagaccccggaacgaagcctccgactggcagagtctagggagcagtcccccagacgaaaggaagtcgagagtcgactgtctccaggcgaatctgcgtaccagaaactcgggctgactgaagcacataaatggcgcccagatagtcgcgaaagccaggagcaatccctggtccagctggaagctacagagtggaggctaagaagcggcgaggagaggcaggattattccgaggaatgcggacggaaggaggagtggccagtacccggagtcgcccctaaggaaacggctgagctgtcagaaacacttactagggaggctcagggaaattcttccgctggggtggaagccgctgagcagagaccagtggaggatggggagcggggtatgaaacccactgagggctggaagtggacacttatcatgagtctcgcaggcaagggaaatcaacatcttgtcacgtgcttcccacatccagtgtctggcggtcgcgctaattgtccgattagtacactgatccagtccccctggtgtggttggggctag

SEQ ID NO: 31635 - DNA, 774 bp, synthetic construct
  source 1..774: mol_type = other DNA; note = Synthetic coding sequence
atgcctcaccttcctttggcgtcctttcggccaccattctggggcctgaggcattctcgtggcctcccccgttttcactctgtgtctactcaaagtgagccccacggctcaccgatctcacgcaggaaccgggaagcaaagcagaaacgactcagggagaagcaggctaccctagaagccgaaatagccggtgaaagtaagagtcctgccgaaagcatcaaggcatggcggccaaaggagctggtgctctacgagattcccaccaaaccaggagagaaaaaggacgtgtctgggccactgccacctgcatattctccaaggtatgtagaggctgcatggtacccctggtgggtgcgcgagggcttcttcaaaccagagtaccaggccagactgccacaggccacaggagaaaccttctcgatgtgtatccccccaccgaatgtgacaggctccctccatatcggacatgcattaactgtggcgatccaagatgcactagtgaggtggcacagaatgcgcggagatcaggtgttgtgggtgccaggcagcgaccatgctggtattgccacccaggcagtagttgagaagcagctgtggaaagaaaggggggtaaggagacatgagctttcaagagaggcattcctcagggaagtgtggcaatggaaggaggcaaaaggcggagagatttgtgagcagctccgcgctctgggcgcttctctcgattgggatcgggtattttaccacggttgttggttgctttctggatgcgactag

SEQ ID NO: 31636 - DNA, 1446 bp, synthetic construct
  source 1..1446: mol_type = other DNA; note = Synthetic coding sequence
atggcctcggccgcttcagtaacgagcctggctgatgaagtgaattgcccgatctgtcaggggactctccgtgaacctgtgacaatcgattgcggccacaatttttgtcgtgcttgcctcacgcgttattgcgagattccaggcccagatttggaggaatctccgacctgccctctttgtaaggagccattcaggccaggctccttcaggccaaactggcagctagcaaatgtggtcgagaatatagagaggctgcaactcgtttcaactcttggactcggggaagaagacgtgtgccaggagcacggagaaaaaatctacttcttctgcgaagacgatgagatgcaactgtgtgtagtgtgtagggaggctggtgagcacgccacgcacaccatgcggtttctggaagatgctgctgcaccttatagagagcaaatccataaatgcttaaagtgcctgcggaaagagagagaggaaatccaggagattcaaagccgcgagaataagaggatgcaggtcctgcttacacaagtgtcaactaaacggcaacaggtcatctcagaatttgcccatctccgaaaattcctggaggagcagcaatccatcctacttgcacagctggaatcacaagacggagacatcctgcgccagcgagacgaatttgacctgctggtggcaggcgagatttgcaggttttccgctctgattgaagagctcgaagagaaaaacgagaggcctgcaagggagcttttaactgacatccgctcaactctgatccgatgtgagacccgcaaatgccgtaagccagtagccgtgagccctgagctgggccagaggatccgcgattttccacagcaagccctgccacttcagcgcgagatgaaaatgtttctggaaaacttacccaatcacctggtgattcctaccgcccacatctctctggacccacagacaagccaccccaagcttctcctgtccgaagaccaccagagggctcagttcagttataagtggcagaatagccctgacaacccccagcgctttgaccgggcaacatgcgtccttgcccatacgggcatcactggcggtcggcacacctgggtagtgagcatcgacttggcccacggcggatcatgtactgtgggggtcgtcagtgaggacgtgcagcggaagggagagttgcgcctgcgcccagaggaaggtgtttgggctgtgcgactcgcatggggattcgtgtcagctctgggttctttccccaccaggctgacccttaaagaacagcctaggcaggttcgtgttagccttgactatgaggttggctgggtgacctttaccaatgccgttacacgggaacctatttacacattcacagcctctttcacaaggaaggtgatcccctttttcggcctgtggggcagggggtccagcttttcattgagcagctag

SEQ ID NO: 31637 - DNA, 597 bp, synthetic construct
  source 1..597: mol_type = other DNA; note = Synthetic coding sequence
atgactttgcggtgcttagagccctccggaaacgggggtgaaggcaccaggtcccagtggggaaccgctggttcagcagaggagccctccccacaggccgctcggctagcaaaagctttgagggaactaggccagaccgggtggtactggggttcaatgaccgtcaatgaggctaaggaaaaacttaaagaggcgcctgaaggaacttttttgatacgagattcctcgcactccgattatctgttgacaatttctgtgaagaccagcgcagggccaacgaacctgaggattgaatatcaggatggcaagtttcggttggatagcatcatttgcgtgaagtcaaaactgaagcagttcgacagcgtggttcaccttattgattattacgttcagatgtgcaaagacaagcgaactggtcccgaggcccctcgcaacggtacggtgcatctgtatcttacaaagcctttatacacatcggcaccttctctgcagcatttatgtcgcctcacaataaacaaatgtaccggtgccatttggggactgcccctgccaacaaggctgaaagattatctcgaagagtacaaattccaggtgtag

SEQ ID NO: 31638 - DNA, 345 bp, synthetic construct
  source 1..345: mol_type = other DNA; note = Synthetic coding sequence
atgacaaccagacaggctaccaaagatcctctgctgcgcggagtaagccctactccgtccaaaatacccgtccggagtcaaaagcggacacctttccctacggtgacaagttgtgcagtcgaccaggagaaccaagatccacgtcgttgggtgcagaaacctccacttaacattcagcgtccactcgtcgatagcgctggacctaggcccaaggcgaggcatcaagcagaaacatctcagaggcttgtgggtatctcacaaccaagaaacccactggaggagttaaggccgagccctcgcggtcagaatgtgggcccagggcctccagctcagacggaggcttag

SEQ ID NO: 31639 - DNA, 1446 bp, synthetic construct
  source 1..1446: mol_type = other DNA; note = Synthetic coding sequence
atggcttcagctgcgagtgtgacctccttagctgatgaggtcaactgtcctatttgtcagggcactcttcgagaacccgtcactatcgactgcggacataatttttgccgtgcgtgcttgacacgatactgtgagatccctggtcccgatctggaagagagccccacgtgtccgctctgcaaggagccattcaggcctggttcctttagacctaactggcagcttgccaatgtggtggaaaacatagaacgcctgcagttggtgtctaccctgggtctcggtgaagaggacgtgtgccaggaacatggggaaaagatctactttttctgtgaggatgatgaaatgcagctctgcgttgtttgtcgcgaggccggagagcatgcaacacatacaatgcggtttctggaagacgccgctgcaccctatcgggagcaaatccacaagtgccttaaatgtcttcgaaaggaacgggaggaaatccaagagatccagtctcgtgagaataaaaggatgcaagtgttattgactcaggtctccacaaagaggcagcaggtcatctctgaatttgcccacttgagaaagttcctggaggagcaacagtctatcttattggcccagctcgagtcacaggacggagatattctgaggcaaagagacgagtttgacctcctggtagcgggtgagatttgtcgattctccgctctgattgaagagctggaagagaaaaatgagaggccagcaagggagctgctgacagatatccgcagcacactcatccgctgtgaaacaaggaaatgcaggaagcccgtggcggtgtcccccgaattgggtcaaaggattagagacttcccccagcaggctctgccgctccaacgcgagatgaaaatgttcctggagaatctgcccaaccatctcgttatcccgacagctcatatttcactcgacccccagacctctcatccgaaacttctgttaagcgaagatcaccagcgggcacagttttcttacaaatggcagaactcacccgataacccccagagattcgacagagccacgtgcgtgctggcacacactggcatcaccgggggtaggcacacttgggttgtttctatcgatctggcacatggcggttcctgcacagtgggagttgttagtgaagatgtgcagcggaagggggagttacgattgcgcccagaagaaggagtctgggccgtaagacttgcatgggggttcgtctcagcccttggctccttcccaacgagattgacactcaaagagcagccacgtcaggtaagggtgagcctggactatgaggtgggatgggtgaccttcactaatgctgtgactagggagcctatatacacgttcactgcctcattcacacgcaaagttatacccttctttggactctggggacggggaagttcattttctctaagcagctag

SEQ ID NO: 31640 - DNA, 396 bp, synthetic construct
  source 1..396: mol_type = other DNA; note = Synthetic coding sequence
atgagcaagcgctacctccaaaaagcaacaaaggggaaattactcattataatcttcatagtcacactgtgggggaaagttgtgagtagcgccaaccatcataaagctcatcatgtaaagaccggtacctgtgaagtagtggccctgcatcggtgctgtaacaagaataaaatcgaagaacggtcccagactgtcaaatgctcttgcttcccgggacaggttgcagggaccacgcgtgctgccccttcgtgcgtagatgctagcatcgtcgaacagaaatggtggtgtcacatgcaaccttgtctcgagggagaggaatgtaaggtgctcccagaccgtaaggggtggtcctgtagttctggaaataaagtgaagacaactcgcgtcactcattag

SEQ ID NO: 31641 - DNA, 765 bp, synthetic construct
  source 1..765: mol_type = other DNA; note = Synthetic coding sequence
atggttcgggaagctaacatcaagcaggcaaccgccgaaaagcagctcaaagaggcccaagggaaaatcgacgttctccaggccgaagttgcagccctgaagaccttggttctaagttcctcccctacttcccccacgcaggagccattgccagggggtaaaactccatttaaaaagggccacaccagaaataaaagtacctctagcgcaatgtccggctcccaccaggatctctcagtcatccagcccatagtcaaggactgtaaggaggctgatctgagcctctataacgaatttcggctgtggaaagatgagcctacaatggataggacctgtcccttcctcgacaaaatctaccaggaagacatcttcccctgcctgaccttcagcaagtcagaattggcgtcagccgtgcttgaggctgtggagaataacacactttctatagagcccgtcggattgcagccaattcggttcgtgaaagcctcagctgttgagtgcggtggcccaaagaagtgtgccctgacagggcagtcaaagagttgcaaacatcgcatcaagctgggggacagctctaattattattatatctcccctttctgccgttaccgcatcacttccgtatgtaattttttcacgtacattcgctacatccagcaggggctggtgaaacagcaagacgttgatcagatgttctgggaagtaatgcagctccgcaaggagatgtccttggcaaagcttggatatttcaaggaagagctatag

SEQ ID NO: 31642 - DNA, 2772 bp, synthetic construct
  source 1..2772: mol_type = other DNA; note = Synthetic coding sequence
atgtgtataccaccgcctaatgtcaccggtagcctccatataggccacgctctgaccgtggccatccaggatgcactcgtgagatggcacagaatgaggggcgatcaggtgctgtgggtcccgggtagtgatcatgctgggatcgccacccaggccgtggtggagaagcaactctggaaggagagaggcgtccgaaggcatgagctttctagagaggccttcctgcgagaagtatggcagtggaaagaagctaaaggcggtgagatctgtgagcagcttcgcgctctgggcgcaagcctggactgggatcgagagtgcttcactatggacgtggggtcaagtgtggcagtgaccgaagcgttcgtgcgcttgtacaaggcaggcctactctacagaaatcatcagttggtgaattggagctgcgcactgagatcagcaatctcggacatcgaggtggagaatcgccctctgccaggacatacacagttaagactgcctggttgtccgactcctgtctcattcggtttgctgttctccgtggccttcccggtggatggcgagccagatgccgaggtggtggtgggcacaactaggccagagaccttgcctggcgatgtggcagtagccgtccatcccgacgacagcaggtacactcacctccacggcaggcagctgagacacccactcatgggtcagccactgcctcttataactgactacgccgttcaaccccacgtgggcacaggtgctgttaaggtgacacctgcacactctcccgctgatgccgaaatgggagctagacacggactatcgccgctaaatgtaattgccgaagatgggacaatgacatctctttgcggcgattggctacaggggttgcatcgatttgtggccagagaaaagataatgtctgtactatctgagtgggggctgttccgcggactgcaaaaccaccccatggttctccccatttgttcaagaagtggcgatgttatcgagtatctactcaagaatcagtggtttgttaggtgtcaggagatgggcgcaagagccgctaaggctgtggagtcaggggctctggaactctctccctccttccatcagaagaattggcagcattggttctcccatattggggactggtgcgtgagcaggcagttatggtggggtcaccagatccctgcttatctggtggtggaagaccacgcccagggcgaggaggattgttgggttgtgggacgctcagaagctgaagctcgagaagtggccgctgagctcaccgggagaccaggagctgaattgacattagagagggaccccgatgtcctcgatacctggttctcttcagcattgttccctttctccgccctgggttggccacaagagacccccgatctggcacgtttctaccctctgagtctcttagagacaggctctgacctccttctattctgggttggaagaatggtgatgctagggacgcagctcacaggccagctgcccttctcgaaagtcttactgcatccgatggtgcgcgatagacaggggagaaaaatgagtaagtcgctgggaaatgtgcttgaccctagggatattatctcaggcgtcgagatgcaggtgctccaggagaaactgcgcagtgggaacctggacccggctgagctggccattgtggctgccgcacagaagaaagatttccctcatgggatccctgagtgcggtactgatgcccttcgcttcacgctgtgttcccatggggtgcaggcaggtgatcttcatctgagcgtatctgaggtgcagagctgtcgtcacttctgtaataaaatatggaatgcattgcgattcatcctgaacgctctgggggagaagttcgtgccacagccagcagaggagctgtcaccttctagtcccatggatgcttggatactgagcagactggccctcgccgctcaggagtgcgagaggggttttctcacacgcgagctgtccctcgtgacacacgctctgcaccacttttggctacataatctatgtgatgtatacctggaggcagtgaaacctgtactctggcatagcccgcgtcctctgggcccaccccaagtgctcttctcctgcgccgacctcggtctcaggttactggcccctctaatgcctttcttagccgaagagctgtggcagagactgccccctagaccgggatgtccaccggcaccatcaatttcagtggccccttacccaagtgcctgttctcttgagcactggcggcagccagagctggaaaggagatttagcagggtgcaagaggtcgtccaggtgctacgtgctctgagagctacgtatcagcttacaaaggcaagaccaagagtgttgcttcagtcctccgaaccaggcgaccagggcctattcgaggctttcctcgaacccctggggaccctggggtattgtggagccgtaggtctgctgcctcctggagccgcagccccatccggctgggcccaggctcccctttcagatacagcgcaagtttacatggagctgcaagggcttgtggacccccaaatccagctcccccttcttgctgcacgcaggtataaactccagaagcagctggacagtctgacagctaggaccccctccgagggagaggcgggtacacagcgacaacagaaactatcaagcctccagttggagctgagcaaattggacaaagccgctagccacttgagacaacttatggacgagccaccggctcccggaagccctgaactttag

SEQ ID NO: 31643 - DNA, 5228 bp, synthetic construct
  source 1..5228: mol_type = other DNA; note = Synthetic coding sequence
atgatggagggaaacggaacagagaacagctgtagccgtactagggggtggctgcagcaggacaacgacgctaaaccttggctctggaaattctcaaattgtttcagcaggccagaacagaccctcccccacagcccccagaccaaggagtacatggagaacaaaaaggtggctgttgaattgaaggacgtaccaagccccctgcatgctggctctaagctctttccagccgtccccctgccggacattcgttcccttcagcaacctaagattcaactatccagcgtccctaaggtatcctgctgcgctcactgccctaacgagccgtcaacctctcccatgcgatttggtggcggaggtggcggttccgggggaacttcctcgctcatacaccctggcgcactgctggattcacagagtacacggacaattacttgccaagttggttccggtttcgctttccagagcgcctcatccctgcaaaatgcttccgcgagaaataatctcgccggtatagcttctgattttcccagcatgtgtttggagagtaaccttagttcttgcaagcacctgccatgctgtggaaagttgcatttccagtcttgccacgggaacgttcacaagctccaccagttcccatctctgcagggctgcacctccgcagggtacttcccctgttcagatttcacgagcggtgctcctggtcatctggaagaacacatatcgcaatccgagctgactccacatctttgcaccaattctttacacctaaacgtggtcccccctgtctgccttaaaggctctttgtattgtgaggattgtttgaacaaacccgctagaaattccattatcgatgccgctaaggtgtggcctaacatccctccaccgaacactcagccggcacccctagcggtgcccctgtgcaacggctgtggaactaaaggcactggaaaagagaccacattgttgcttgcaacctccttggggaaagctgcatcaaaattcggatcacctgaggtcgctgtagcgggacaggtgttagaaaatctgccgccaatcggagttttctgggacatagagaactgcagtgtacccagtggcaggtcagccacagccgtcgttcagagaattcgtgagaagtttttcaagggacatcgggaagccgaatttatctgcgtttgcgacatcagtaaggaaaacaaagaggtcattcaggagctcaataactgtcaagtgaccgttgcgcatatcaacgccacagccaaaaatgcagctgacgacaaattaaggcaatctctgaggcggttcgcaaatactcacactgcccctgctaccgtcgtgctggtttcgaccgatgttaactttgccctggagctgagcgacttaagacatcgacacggtttccacattatcctcgtgcacaaaaatcaggcaagcgaggccttactccaccacgctaacgagttgattcgctttgaagagttcatttcagacctaccaccaaggctgcccctgaagatgccctgtcataccctactatatgtctacaacctccccgctaacaaagacggtaaaagcgtgagcaaccggcttcggagactttctgataactgtgggggtaaggtcctttcaatcaccgggtgctctgcgatcctccggttcattaaccaagactctgccgagagggcccagaaacggatggagaatgaagacgtctttgggaacaggatcatcgtttcctttactcccaagaaccgggaactgtgtgaaactaaatcgtccaatgcgattgctgataaagtcaagagcccgaaaaagctaaaaaaccccaagctatgtctgatcaaagacgccagcgaacagtcgtcaagcgctaaagcgacccccggtaaaggtagccaggccaactcagggtccgctacgaagaacaccaacgtcaagtcacttcaagagctctgtcggatggagtctaaaaccggtcatcggaactccgaacaccaacagggacatctgcggcttgtggttccaactcacggcaatagctccgccgctgtgtctactcctaagaatagcggtgtagctgagcctgtgtataagacctcccagaaaaaggaaaatctgagcgccagatctgtgaccagctctccagttgaaaagaaggacaaggaagaaactgtctttcaggtctcatatccctctgcctttagcaagctggtggcttcaaggcaagtttcccccctgctcgcaagtcagtcttggagctcttcaagaagcatgtcacccaacctgctgaatcgtgcttccccactcgcatttaatatcgctaattcctcctccgaagctgactgtccagatccttttgctaatggagctgacgtgcaagtttccaatattgactaccggctctctagaaaagagctgcagcaactccttcaggaggccttcgccaggcatggcaaggtaaagagcgtcgagttgtcacctcatactgactatcagttgaaggccgtggttcagatggagaatctacaggacgctatcggagcagtgaactctctacatcgctacaaaatcggatccaagaagatcctggtgagtttagccaccggtgcggcatcaaagtctctgagcttgctgtccgccgagactatgtccgtcttacaggatgccccagcgtgttgcttgcccctgttcaaattcactgacatttatgaaaagaaatttggacataaactaaacgtgagtgacctatacaaactaaccgacacagtcgctatccgtgagcaggggaacggcagattggtgtgcttgttaccctccagccaggccagacaaagtccactgggcagctcacagtcccatgacggatccagcaccaattgttcaccaattatattcgaagagctggaatatcacgaaccggtgtgtagacagcattgtagtaataaggacttcagcgagcatgagttcgatcccgacagctacaagattcctttcgtgatcctgagcttaaaaaccttcgccccacaggtccattccttgctacagactcatgaaggcaccgttccactgctgtcatttccggattgctatatcgcagaatttggggacttagaggtcgtgcaggaaaatcaggggggtgtgccacttgagcatttcattacctgtgtccctggagtaaacatcgcaaccgcgcagaatggaataaaggtggtgaaatggatccacaacaagcccccaccaccaaatacagacccatggttgctcaggtcgaagtcacctgtgggcaacccacagctgattcaattctctcgcgaagtgattgatctcctgaagagccaacccagctgcgttattcctatttctcacttcattccatcatatcaccatcacttcgcaaaacaatgcagagtttctgactatggatacagcaagttgatcgaactcctcgaagccgtccctcacgtgctccagattctgggcatgggatcaaaacgactactgaccctaacgcatagagctcaagtcaagaggtttacccaagacttgctgaagctgctcaaaagtcaagccagcaaacaggtgatagtccgtgagttctcccaggcctaccattggtgcttcagcaaagactgggatgtgaccgagtatggcgtctgtgagctgatcgatatcgtttcggagatccccgataccacaatatgcttgtcccagcaggataatgagatggtcatttgtatccccaagagggaaaggacccaggatgagatagagaggacaaagcagttcagcaaggatgtggttgatttactcagacatcaaccgcacttcagaatgccgtttaataaattcattccttcttatcaccatcatttcggaagacagtgcaagctggcatactatgggttcactaaactgctggaattgtttgaggcaattccagacacactgcaggtgctggaatgtggtgaagagaaaatactgactctcaccgaagttgaacgattcaaggccttggctgcccaattcgtgaagctgttacggagccagaaggacaactgcctgatgatgactgatctactgaccgagtacgcaaaaactttcgggtacaccttcaggctgcaggactacgatgtcagctctatatccgctcttacacagaaactttgccatgtggtcaaggtcgccgacattgaatctggacgccagatccagttgattaatagaaagagcctacgatcacttacagctcagttgctagtactgctgatgagctgggagggcacgacccacctttccgtcgaagaactaaaaaggcactacgagtcgacacacaatacaccactaaatccctgcgaatatggtttcatgaccctcaccgagctcctgaagagtctcccatatcttgtggaggtctttactaatgataaaatggaggagtgtgttaagctcacttcactgtatctgtttgcaaaaaatgttaggtctctcctccacacctaccactatcagcaaatattcttgcacgagtttagtatggcctacacaaaatacgtgggtgagacgttgcagcctaagacatacggtcactcttccgtcgaggaactgctcggagccataccccaggttgtatggattaaagggcacggccacaagaggattgtcgtactgaagaacgatatgaaatcaaggctgtcaagcctttcattgtcgcccgcaaaccatgagaaccagccgagtgagggggaacgaatcttggaagtaccagagtctcataccgcgagcgagctgaaacttggggctgacggctctggaccttcccacactgagcaggaattactgcgcctgaccgacgactcacctgtagatctgctttgcgcaccagtgccgagctgcctgcctagcccacagctgaggcccgaccccgtgatccttcagtcagccgatctgatccagttcgaggagcgaccccaagagccctctgagatcatgatactgaaccaggaggagaaaatggagattcccattccgggtaagtctaaaacattgacctctgacagctctagtagctgcatttctgctgccgttcctgtgcctccctgccctagctctgagacctcagagtcactcttaagtaaggatccagttgagtcaccggcaaaaaagcaacccaagaaccgggttaagctcgcggcaaactttagcctggctccaataacaaaattgta

SEQ ID NO: 31644 - DNA, 774 bp, synthetic construct
  source 1..774: mol_type = other DNA; note = Synthetic coding sequence
atgccacacctacctctggcaagttttcggccacctttctggggcctgcgacacagccggggactgcctcgcttccactctgtatccacccagtctgagccccacggaagccccatctcccgcaggaaccgcgaggctaaacagaagcgcctgagggagaagcaggccacactggaggctgaaatcgcaggcgaatccaagagccctgccgagtcaattaaggcgtggcgcccaaaggagctagtgctctatgagattccaaccaagcccggtgaaaaaaaggacgtgtctggtccacttcccccagcctactctcccaggtatgtcgaagccgcatggtacccatggtgggtccgcgagggattttttaaaccagaataccaggccagattgccacaggccaccggggagaccttttccatgtgcataccccctcctaatgtaacgggatccctgcacataggccatgctcttactgtggcgatccaagatgcattagttagatggcaccgtatgaggggcgaccaggtgctgtgggtccctggatctgaccacgccggaatcgctacccaggcggtggtagagaagcagttgtggaaggagcggggagtgaggcgtcacgaactgtcgcgggaggcatttcttagggaggtgtggcaatggaaggaagccaagggcggagagatctgtgagcagctgagagccctcggagcttccctggactgggatcgggtcttctaccatggctgttggctcctaagcggctgtgactag

SEQ ID NO: 31645 - DNA, 1134 bp, synthetic construct
  source 1..1134: mol_type = other DNA; note = Synthetic coding sequence
atggccacgatcccggactggaaactacagttgttggccaggcgcagacaggaagaagcctccgtgagaggtcgggagaaggctgagagggaaaggctctcacagatgccagcttggaagagaggtctactcgaacggcgtcgtgccaagctgggactgtctccaggtgaaccgtcacctgtgctcggcaccgtcgaggcgggtccaccagaccccgacgagagcgccgtgcttctcgaggctatcggcccagtgcatcagaacaggtttattcgccaagaacggcagcagcagcagcagcaacaacagagaagtgaggagctgctggccgagagaaaacccggaccactggaggcacgagagaggaggcccagccctggcgaaatgcgcgaccaatcacctaagggcagggagagtagggaggaacggctgagtcccagagagacacgggaaaggaggctggggattggaggagcacaggagcttagcttgaggcccctggaggccagggactggagacagtccccaggtgaagtgggagacagatctagtcggttatccgaggcttggaaatggcggctgagcccaggcgaaacccctgagagatcccttagactcgcggaatcgcgcgaacaatcacctcggaggaaggaggtcgaaagtagactctctccgggagagagcgcctaccaaaagctggggctcacagaggctcataagtggcgcccagacagtagagagagccaggagcaatcgctggtgcaattggaggccaccgaatggagactgaggtccggcgaagaacgtcaagactacagcgaggaatgtggcagaaaggaggagtggcccgtgcctggggtcgccccaaaagagaccgctgaactgagcgagaccctcacgagggaggcacagggaaatagctccgccggtgtagaggcggctgaacagagaccagttgaagacggagagagggggatgaagcccacggagggatggaagtggacactcattatgagcttagccggtaaagggaatcagcacttagtgacctgttttccacatcctgtctctggcggacgcgcaaattgtccgatctccactctgatccaaagcccatggtgcggatggggatag

SEQ ID NO: 31646 - DNA, 495 bp, synthetic construct
  source 1..495: mol_type = other DNA; note = Synthetic coding sequence
atgcgcattctgatcttgggcctggatggcgctggaaaaacaactatattatatcggttacaggtgggagaggtagtgaccactattcctacgattggtttcaatgttgaaactgtcacctacaagaatctcaaattccaggtgtgggaccttggagggcagacgtctatcagaccatactggcgatgctactatagtaatactgatgcagtgatctacgtcgtggacagctgcgaccgagaccgcataggtatcagcaaatccgaactggttgctatgctcgaagaagaagagctaaggaaggccattcttgtcgtgtttgcgaacaagcaagacatggagcaagccatgacatcttcagagatggcaaacagtctcggattgcccgcactaaaggacagaaagtggcagatcttcaaaacaagcgccactaaaggaacaggtttggacgaagccatggagtggctagtggagaccctgaagtccagacagtag

SEQ ID NO: 31647 - DNA, 393 bp, synthetic construct
  source 1..393: mol_type = other DNA; note = Synthetic coding sequence
atggatactatgatgctcaatgtgcgcaatcttttcgagcaattggtccgcagagtcgagattctgagcgaaggcaacgaggtgcagtttatccaactcgcaaaagactttgaagactttcggaagaaatggcaaaggactgaccacgaattagggaaatacaaggatctcctgatgaaagctgagacagagaggtccgcactcgatgtaaaactcaagcacgccagaaatcaggtggatgttgaaatcaaacgccgtcagcgggctgaggccgattgtgagaagcttgagcggcagatacagcttattcgggagatgcttatgtgcgatacttctggtagcattcagttgtcggaagagcagaagtcagcgctcgcctttttaaatagatag

SEQ ID NO: 31648 - DNA, 324 bp, synthetic construct
  source 1..324: mol_type = other DNA; note = Synthetic coding sequence
atggataccatgatgctgaatgtgaggaatttgttcgagcaacttgtgcgacgcgttgagattctgtcggagggaaacgaggtgcagttcatccagctggccaaggactttgaagattttcgtaagaagtggcaaaggaccgaccatgagctcggaaagtacaaggacctgctcatgaaggcggagaccgagaggtcagccctggacgttaagttgaagcatgccagaaatcaggtcgatgtggagatcaagcgcaggcaacgggcagaagccgactgtgagaagctggagagacagattcagctgattcgagagatgctctag

SEQ ID NO: 31649 - DNA, 885 bp, synthetic construct
  source 1..885: mol_type = other DNA; note = Synthetic coding sequence
atggataccatgatgctgaatgtgcgtaacctattcgaacagttagtgaggcgagtggagatacttagcgagggcaacgaggtccagttcattcagctcgcgaaggactttgaggacttcagaaaaaagtggcagcgcaccgatcacgaactgggtaaatataaagatctcctgatgaaggcagagactgaacgatccgctctcgatgtgaaactcaagcatgccaggaaccaggtggacgttgaaatcaagcggaggcagcgggctgaggccgactgcgagaaactggagcgccagatccagctcatccgggaaatgcttatgtgtgacactagtggatccatccagctgagcgaggagcaaaaatctgctctagcttttcttaacagaggtcagccttcgtctagcaacgccggaaacaagcgacttagtacaatcgacgagtcaggcagcatcctctcagacatcagcttcgacaagaccgacgagtcattagattgggatagctctctcgtgaaaacattcaagcttaaaaagagggaaaaacggagaagcacttcacgacagttcgttgatggaccacccggtccagtgaaaaaaacccggagcattggctccgcggtggaccagggcaacgaaagcatcgtggccaagaccaccgtgaccgtgcccaacgacggcggaccaattgaagccgtcagcacaatcgaaaccgtgccctattggacgaggagcagacgcaagaccgggacattgcagccctggaattcagacagcacattaaacagccgtcagctagagcccagaaccgagactgacagcgtcggcaccccacaaagcaatggcggaatgcgcctgcacgacttcgtgtcaaagacggtatag

SEQ ID NO: 31650 - DNA, 504 bp, synthetic construct
  source 1..504: mol_type = other DNA; note = Synthetic coding sequence
atggaggagacatacaccgacagcctagatcccgaaaagctgctccaatgcccatacgacaagaatcaccagatacgcgcatgtcgttttccttatcatctcattaaatgcagaaaaaaccatcctgacgtggccagcaagcttgctacatgtccattcaacgctcgtcatcaggtccctagagcagaaatttcacaccacatcagctcctgtgacgatcgcagctgtatagaacaggacgtagtcaatcagactcgatccctacgtcaggaaacgcttgccgagtctacttggcaatgtccgccatgcgacgaagactgggacaaggacctctgggagcagacgagcactccattcgtgtggggaacaacccactactcagataacaactctcccgctagcaatatagtgaccgaacacaagaataaccttgcaagtggcatgcgcgttcctaaaagcctcccttatgttctgccctggaagaacaacggcaatgcacagtag

SEQ ID NO: 31651 - DNA, 882 bp, synthetic construct
  source 1..882: mol_type = other DNA; note = Synthetic coding sequence
atgctacgcgagccccgaaaacagggtcttgctggacgggctcacttgctgtcgccaggcaccactggctctatgaaaactcccgtggagctggctgtgagcgggatgcagaccctcgggcttcagcaccgctgtaggggcggataccgagtcaaggctagaacgtcgtacgtcgatgaaactcttttcgggtcccccgcagggactaggcctactccaccagacttcgatcctccatgggtcgagaaagccaataggactaggggggtgggaaaggaggcctcaaaggccctcggcgctaagggcagctgcgagacaaccccatctcggggaagtacaccaactctgactcccagaaaaaaaaacaaatacagacctatttcacacaccccctcttattgcgatgagagtctgttcggttctcgaagcgaaggggcttcttttggagcacccaggatggctaaaggagacgccgctaagctccgggctctgctgtggacgccgccaccaacacctaggggcagtcactcccctaggcccagagaggcaccacttcgggcaattcaccccgctggcccttcaaaaactgagcccggaccagcagccgattcccagaaactatccatgggtggactgcactccagccgtccgctgaagcgaggcctctctcactccctgactcatttgaatgttcctagtaccggtcaccccgcaactagtgcccctcacacgaacgggccacaggatctgcgtccctccacttcaggtgtgacctttagatccccgctggtgacttccagggccagaagcgtttcgattagcgtgccttcgaccccccgacgcggaggtgccactcaaaagcccaaaccgccatggaagtag

SEQ ID NO: 31652 - DNA, 3282 bp, synthetic construct
  source 1..3282: mol_type = other DNA; note = Synthetic coding sequence
atgggtggcaaagcttggccacggagagccgtgggaaccgcgggaggcccatgtgccgagcaaatcagcgcaccatttcagacactactgatgccacacttgcccctggcgtcattccggccaccgttctgggggctccggcactcaaggggcctacctcgcttccattcggtttccacccaatctgagcctcacggcagccccataagccgtagaaacagggaagctaagcagaaacgtctcagagaaaagcaggcaaccctcgaagccgagatcgcaggcgagagcaagtctcccgcagaaagtattaaggcctggcggcctaaagaactagtcctatacgagatccctaccaagcccggagagaaaaaggacgtatctggaccgctccctcctgcctattcccccagatacgtcgaggccgcatggtacccatggtgggtaagagaaggttttttcaagcccgaatatcaggcccgtctgcctcaggccacgggggagaccttttccatgtgcatccccccacctaatgtcactggttccctgcacattggccacgccctcacagtcgccatccaggacgcgctggttcgctggcaccgaatgcggggtgatcaggtcctgtgggtgccagggtccgaccatgctggcattgctacccaggctgtcgtggaaaagcagctgtggaaggagcgtggtgtccggagacacgagctgtcccgggaggcatttcttcgtgaggtgtggcagtggaaagaggctaaaggcggagaaatttgcgagcagctgcgcgctttgggcgcatctctggactgggaccgggaatgtttcaccatggatgtggggtctagcgtcgccgtcactgaagcgttcgtgcgcttgtacaaggccggactgttgtatagaaatcatcaacttgtcaactggagctgtgcactaaggagtgcaatcagtgatatcgaagtcgaaaatcgcccactcccaggccatactcaactacgcctgcctgggtgtcccacccccgtgagctttggtctgctgttctcggttgcgttccctgtggacggagaacccgatgccgaagttgtagtgggcactacaagaccagaaaccttgcctggggacgttgctgtggctgttcaccctgacgattccaggtacacccacctgcacggaaggcagctgagacacccactgatgggtcagcctctgcccctaataacagactacgcagtacagccccacgtagggacaggcgcagtcaaggtgactcctgctcattctcccgcagatgctgaaatgggggctcggcatggcttgagccctcttaatgtgatcgccgaggacggtacaatgactagcttgtgtggtgattggttgcagggccttcaccgtttcgtggctcgggaaaagattatgtctgtgctctctgaacgtgggctattccgaggattacaaaatcatcctatggtgctccctatctgctctcgttctggcgacgtaatcgagtatttgctgaagaatcagtggttcgtcaggtgtcaggaaatgggcgcaagagcagcaaaagcagtggagagcggcgctctagaactctcaccctctttccaccaaaaaaactggcaacactggtttagtcacatcggggattggtgcgtctcccgccaattgtggtgggggcaccagatcccagcttacctcgtggtggaggaccatgctcagggcgaagaagattgttgggtggtaggacgcagcgaagccgaggccagagaggtcgctgccgagttgaccggcagaccaggagcggagctgacactcgagcgcgaccccgacgtgctggatacctggttttctagcgcgctctttcctttttcggctcttgggtggccccaggagacccctgacttagcgcgattttaccccttaagcctgctggaaaccggctctgatctgctgctgttttgggtcgggaggatggtgatgctgggtacacagctgacaggacagctgcctttcagcaaggtcctcttgcatcccatggttagagatagacagggtcgcaaaatgtctaaatctctcgggaacgtcctagaccccagagatatcatctcaggagtggaaatgcaattactacaagaaaaactacgttctggcaacctcgaccccgcagagctcgccatcgtggccgctgctcaaaagaaagattttccacacggaatacccgagtgcggtaccgacgcactgcggttcacgctgtgttcccacggggtgcaggccggtgacctgcatctttctgtgagcgaggttcaaagctgtcggcacttttgtaacaagatctggaatgctctgagattcatcctgaatgcccttggggagaagttcgttccgcagcccgcagaggagctctccccatcatccccaatggacgcttggatcctatctcggctggctctggctgcccaagagtgcgagcgagggtttctgacccgtgaactatccctggttactcatgccctgcatcacttctggctgcacaacctctgcgatgtatatttggaagcagttaagcccgttctgtggcatagccctaggccactcggaccaccccaggtccttttcagctgcgccgatctgggcctccgtctattggccccactgatgccctttctggccgaagagctttggcagagactgcctcctcggccaggctgtccgcctgctccgtctatctccgtagcaccttacccctcagcttgctcattagaacattggcgtcaacccgagctggagcgccgattttcaagggtgcaggaggtggtgcaggtgctccgcgctttgagagcaacttaccagcttacaaaggcaagaccacgtgttttactgcagtcttctgaacctggcgatcagggtcttttcgaggcgttcctggagccacttggaaccttgggctattgtggcgcagtcggtttgttgccaccaggcactgcggctccgtcaggctgggctcaggccccactgtccgataccgcccaggtgtacatggaactgcagggcctcgtggatccccagattcaattgccactgctggcggctcgaaggtataaactgcagaagcaattggacagcctaacagctcggactccaagcgaaggcgaagcaggtacgcaaagacaacagaaactctcctcactccagctggagctaagcaagttggataaagcagccagtcatttgaggcagctgatggacgagccccctgccccaggctccccggagctttag

SEQ ID NO: 31653 - DNA, 276 bp, synthetic construct
  source 1..276: mol_type = other DNA; note = Synthetic coding sequence
atgggcaagaagaccaaaaggaccgctgattccagctcctcagaggacgaggaggagtatgtcgtggagaaggtcctagataggcgcgttgttaaggggcaagtcgagtatcttctgaagtggaagggattctccgaagaacataatacatgggagcctgagaagaacctggactgccccgagctcatctctgagttcatgaagaagtataaaaaaatgaaggagggagaaaataacaagcccagagagaagagtgaaagtaataaacggaaatag

SEQ ID NO: 31654 - DNA, 390 bp, synthetic construct
  source 1..390: mol_type = other DNA; note = Synthetic coding sequence
atggcagagttaattcagaagaagttacagggggaagttgagaaatatcagcaactccagaaggacctgtctaaaagtatgtccggaagacagaaattggaagcccagctcactgagaacaacatcgttaaggaagagttggctctactcgatgggagtaatgtcgtttttaaactgttgggaccagtccttgtcaagcaggagctgggagaagcacgggcaacagtaggtaagcgccttgactacatcacagctgagatcaagcgttacgagtctcagctgcgggatctggaaagacaatcggagcagcagcgcgaaaccttggcccagttgcagcaggaatttcagcgtgctcaggccgctaaagcaggcgcaccaggtaaggcttag

SEQ ID NO: 31655 - DNA, 1134 bp, synthetic construct
  source 1..1134: mol_type = other DNA; note = Synthetic coding sequence
atggctaccatacctgattggaagttacagctccttgccaggcgcagacaagaagaggcctctgtgaggggcagggaaaaggcagaacgggagcggctgtcccaaatgccagcttggaagaggggattgttagagcgtcggcgtgcaaagttaggcctctctcccggtgagccaagtcctgtcttaggtaccgtggaagctggtcccccagacccagacgagtccgctgtgcttctggaagcaattggacctgtgcaccagaacaggtttattaggcaggagcgccaacagcaacagcagcagcaacagagaagtgaggaactgctagccgaaaggaaaccaggccctcttgaagctagagaaaggcgccctagccccggagaaatgagggatcaaagccctaagggccgagagagccgagaggagaggctgagcccacgagagactcgggagagacggctcgggatcggaggagcccaagaactcagcctccgcccacttgaggctcgggactggaggcagagccccggtgaagtgggcgacagaagcagcaggctttcagaggcatggaagtggcggctctctcctggcgagacccccgaaagaagcctgagactggccgagagtagggagcaatcccctaggagaaaagaggtggagagcagactgagtccaggcgagtccgcataccagaagttaggccttacagaggctcataagtggcgacctgacagcagagagagccaggaacagagcctagtgcagcttgaagcaactgagtggaggctcaggtcaggcgaagagagacaggattatagcgaggagtgtggtagaaaagaggaatggcctgtccctggtgtggcccctaaagagacggctgaactgtcagagaccctcacacgcgaggcccaaggaaactccagtgcgggagtcgaagcggcagaacagaggcctgtcgaggatggcgagcgaggcatgaaacccacagaaggttggaagtggaccttaattatgagccttgcgggaaagggtaatcaacacctggttacatgttttccacacccagtatctggaggcagggcaaactgtcccatctccaccctgatacagtctccatggtgtggctggggctag

SEQ ID NO: 31656 - DNA, 2031 bp, synthetic construct
  source 1..2031: mol_type = other DNA; note = Synthetic coding sequence
atgtctgatcagattaaattcattatggacagtctgaataaagaaccgttcaggaagaattacaacctaataacgttcgactcacttgaacctatgcagctgttacaagttttgtccgatgtcctggcagagatagatccaaagcaattggtggacattcgggaggagatgcccgagcagaccgccaagagaatgctctcacttcttggcattttgaaatacaaaccctcaggtaacgcaacagacatgtcgacattcaggcaagggctcgtaattgggagtaaacctgtcatttatcccgttcttcattggctgcttcagcggactaatgagttaaagaaacgggcttatcttgcacggttcctgattaaactggaagtgccctccgaattcctccaggatgagacagtggccgacactaacaaacagtatgaggaactgatggaggcattcaagactctccataaggaatatgaacagctgaagatcagtggctttagtaccgcggagattcgcaaagacatttcagcgatggaggaggagaaggaccagctgatcaagcgcgtagagcatctgaagaaaagggtggagaccgcccagaaccatcagtggatgctgaagatagcgaggcagctgagggttgagaaagaaagggaggagtatctcgcacagcagaagcaggaacagaagaatcagctctttcatgccgttcagcggcttcagcgtgtacagaaccagctaaagtctatgagacaggctgccgctgacgcaaagcctgagtcactaatgaagcgccttgaagaggaaatcaagtttaatctgtacatggtgaccgaaaagttccccaaagagctcgagaataagaagaaggagctgcacttcctgcaaaaggttgtgtctgagcctgctatgggccattccgaccttcttgaactggagtctaaaattaatgagatcaatacagagatcaatcaactgatagaaaagaaaatgatgcgcaacgagcccatcgaaggtaaacttagtctctaccgacagcaggcctccatcatctcaaggaagaaagaggccaaagcagaggaattacaggaggccaaggagaaacttgcaagtcttgagcgggaggcctcggtaaagagaaaccagaccagagaattcgacggtaccgaagtattgaagggggacgaatttaagaggtacgtgaacaaattgagaagcaaaagcaccgtgtttaaaaagaagcaccagattattgcagaattgaaagccgagttcggactgcttcaaagaaccgaggaactccttaagcaacgtcacgaaaacattcagcagcagcttcagacaatggaagaaaaaaaaggcatctccgggtattcttatacccaggaagaactggagagagtgagcgccctaaaaagcgaagtcgatgaaatgaagggcagaaccctggatgacatgagcgaaatggtgaagaagctctattctctggtgtctgagaaaaaaagcgcccttgcatcagtcataaaagaacttcggcagctccgccagaagtaccaagagctcacacaggaatgcgacgagaagaagagccagtatgacagctgcgccgctggcttagagagtaatcgctctaagctcgagcaggaggtgaggcggctcagggaagaatgcctgcaggaagagtctcgatatcattacactaattgcatgattaaaaacctcgaggtccagctccggagggccaccgatgaaatgaaggcttacatttcaagcgaccagcaggagaagcgaaaggccattcgggagcagtataccaagaacactgccgaacaggaaaacctgggcaagaaactcagagagaagcaaaaggttattagagaatctcatggaccaaacatgaaacaggccaagatgtggagagatctggagcagctgatggagtgtaagaaacaatgtttcttgaagcagcagagccagacctccattggccaggttattcaggagggcggagaagacagactgatcctttag

SEQ ID NO: 31657 - DNA, 456 bp, synthetic construct
  source 1..456: mol_type = other DNA; note = Synthetic coding sequence
atggatactatgatgctgaatgttagaaacctgtttgagcagctagtgcggcgtgtcgagattctgagcgaaggtaacgaagtgcagtttattcagctcgccaaggatttcgaggattttagaaagaagtggcaaaggaccgaccacgagctgggaaaatataaagatctgttgatgaaggctgagacagaacgatcagctctggatgtaaagctcaaacacgcacgcaaccaagtggatgtggaaatcaagcgaagacagcgtgcagaggccgactgtgaaaagttagaacggcagatccagctgattagagaaatgttgatgtgtgataccagcgggagtatccaactttccgaagagcagaaatccgccttggcctttcttaatcgtggacagcctagctccagtaatgctggcaacaagcgcctgtctacaatcgacgagtccgggtcctag

SEQ ID NO: 31658 - DNA, 1446 bp, synthetic construct
  source 1..1446: mol_type = other DNA; note = Synthetic coding sequence
atggcgtccgctgcttctgtgactagcctggctgacgaagtgaactgtcctatctgccaggggacccttagagagccagtgactatcgactgtggtcataatttctgtcgggcatgcttgaccaggtactgcgagattcccggacctgacctggaggaaagccccacctgccccttatgcaaggagcccttccgccctggatcattcagacctaattggcagttggcgaacgttgtggaaaacatagagcgactacagctggtttcgaccctaggcctaggggaagaagacgtttgtcaggagcacggagagaagatctacttcttttgcgaagacgatgaaatgcagctgtgtgtagtctgccgtgaagccggagagcatgccacgcacaccatgaggttcctcgaggatgccgcagccccttacagggagcagatacataagtgcctgaaatgcctaaggaaggaaagagaggagatacaggagatccagtcacgagagaacaagcggatgcaggtgctgctgacccaggtctcaacaaagcgacagcaggtaatcagtgagtttgcacacttaaggaagtttctggaggaacaacagtcaattcttctagcacagctagagtcgcaagacggggatatccttcgacaacgcgacgagtttgacctattggttgccggtgagatatgtcgattctcggccctcattgaggagctggaggagaaaaatgagcgaccagccagagagctcctaaccgacattaggtccaccctcatccggtgcgagacgaggaagtgtcgcaaacctgtagcagtatccccagaactcggtcaaaggatcagagatttcccacaacaagcactgcctctccagcgggagatgaagatgtttctcgagaacttaccgaatcatctcgtgataccgaccgcacacatcagcctggatcctcagaccagccaccctaagctgctgctgtctgaggaccatcagagggcccagttttcttataagtggcaaaacagtccagataaccctcagcgatttgacagggcaacctgcgttctggctcatacgggtattaccggcggtcgccatacatgggtcgtgagcattgatttagcacacgggggatcatgcaccgtgggcgtggtttctgaggatgtgcagagaaagggagagctgaggctcaggccggaggagggggtatgggccgtccggcttgcttggggtttcgtgtccgcccttggcagctttccgacacgcctgactctcaaggaacagcccaggcaggtgcgcgtgagtctggattacgaggtggggtgggtgacgttcacgaatgccgttacgcgggaacctatttatacattcacagctagcttcactcggaaggtgatccctttcttcgggctctgggggaggggcagctctttttcactgtcctcttag

SEQ ID NO: 31659 - DNA, 765 bp, synthetic construct
  source 1..765: mol_type = other DNA; note = Synthetic coding sequence
atggttcgagaggccaatatcaagcaggctacagccgagaaacaactgaaagaagcacagggcaagatcgatgtacttcaggcagaggtggctgccctcaagacgcttgtactctccagcagccccacgagtccgactcaggagccactgccaggcggtaagactccatttaagaagggccatacccgtaataagtctacctccagcgccatgtccgggtcccaccaggatttgtccgtgatccagccaatagtgaaggattgcaaggaagccgatctctctctctataatgagtttagactgtggaaggatgagcctactatggatcggacgtgtcctttcctcgacaagatctatcaggaagatatcttcccatgtctgactttctctaagtctgagctggcttcagcggtgctggaagcggtcgaaaataacacattgagtatagaacctgtaggcttgcagcctattaggtttgtcaaagcatctgcagttgagtgcggcggtcctaaaaagtgtgctctcacaggacagtctaagagctgtaaacatcgcatcaaactaggcgatagtagtaattattactacatatcacccttctgtcgatatcgtatcacctcagtctgcaatttttttacttacataagatatattcaacagggcctggtgaagcagcaagatgtggatcagatgttctgggaggttatgcaacttcggaaagagatgtctcttgccaaactgggttatttcaaggaagagctgtag

SEQ ID NO: 31660 - DNA, 1446 bp, synthetic construct
  source 1..1446: mol_type = other DNA; note = Synthetic coding sequence
atggcgtctgccgcatccgtcacaagcctcgctgatgaggtcaattgccccatctgtcaaggaaccctaagagaacctgtgacgattgattgcggtcataacttctgcagagcttgcctcacccgatactgcgaaattcctggccctgacctggaagaatccccaacatgtcccctgtgcaaggaaccattccgcccagggagctttcgcccaaactggcaactggctaacgtagtcgagaacatagaacggctgcaacttgtctctaccctcgggctaggggaagaagatgtgtgtcaggaacatggggagaagatctacttcttctgcgaagatgatgagatgcagctatgtgtggtgtgcagggaggctggtgagcacgctacacatacaatgagatttctggaagacgccgctgcaccgtatcgcgagcagatacataaatgcctgaagtgcttacgaaaggaacgagaggaaatccaagaaattcagtcccgggagaacaaacggatgcaagtgttgttgacgcaggtgtctacgaagaggcaacaagttatttcagaatttgcacacctgcgtaaatttctggaagagcaacaatcgatcttgctcgcccaacttgaatcacaggacggcgacatcttgcgtcaacgggatgagttcgacctactggtggcaggcgagatatgccgattctcagccctgattgaggaactggaagaaaagaatgagcgccctgcacgggaactactcaccgacatccggtccaccctgattcgctgcgaaacccgaaagtgccggaagcctgtggccgtctcacccgaactggggcaaagaataagggattttccccaacaggcactgccccttcagcgtgaaatgaagatgtttttggagaatcttcccaatcacttggtaatccccaccgcacatatctctttggatccccaaacctcccaccctaagctgttgctctctgaggatcaccagcgagcacagttctcgtataagtggcagaattcaccggataacccacagcgctttgaccgcgcaacctgcgtcttggcccacactggaatcactgggggaaggcacacttgggttgtctccatcgatcttgcccacggcggaagttgtaccgttggcgtggtctccgaggatgtccaacggaagggtgagctgagattgcggcctgaggaaggggtttgggcagtgagattggcttggggctttgtgtccgctctgggcagctttccaacacggttaacactgaaggaacagccacgtcaggttcgggtctcattagattacgaggtaggctgggtgacatttaccaatgcagtgacacgcgagcccatttatacttttactgcctcgtttacacgtaaggtgatcccttttttcggcctgtggggtagggggtcctcattctcactcagctcctag

SEQ ID NO: 31661 - DNA, 1974 bp, synthetic construct
  source 1..1974: mol_type = other DNA; note = Synthetic coding sequence
atgctgggcccaagctgggacggagatgaggctgagagcacaggggagattatcaggctgggcgacactgcacatacattcagcctgcgcagtaatggagcccagtgtcctaacgagatgctgtcgaaaaaagctctcgccagccccagctccaaatcccatgaggacatgctgtatcccccatctgttctgagtaagtcacgaacctcattcgtggaagataccgagactctgtccgtgtccgggattcccaacgctcgtaagctcggcgaaccaataagggcggcaatccctctgcaccccccttatcatccctccgagccccgagccccttgcccaataggcaaggagtacctccattcttctcactgtagccctgccgtcaacagcaccggggagcacacagagttcagcggtgatctggacgatgggctctttctaattagtaagttgcctaagggatctaaatgggaagtgtaccccgcacaggtgcaaggaccgagaacaagaaagcctccaaaggggaaacgcaatgaaaatcgggctacagcctcctcttgcaactcccctttccctcagcgaccccgtaaaaggctaacggagcaggaactgcacgacgtcagcgagaaactcagtcaaagactgagtgagctggactggatgctcaaatccgcactgggggatcgaatcaaggagaagacagatcataaagaggagaatacggggaacgaggaagtggaagatggcaccgaggaaactctgtctcagcattcagacggaatcgttgagtacggtcccaaaaaaagccggcctggtctctctatgcggagaaagcctccgtacagatcacactccctgagtccctctccagtgaataagcacaaacaatttcatcttgaacgaaagaggcagagaaaacctcgagagacggatgtcaggcaatttcaggctcaggcttttacggaggcctttgagagagagctgcggagacacaaggtccaggaaaatattgggcctctgcggattcatgagaaggaggaggagaccgagaagatctatcgcggtgaagccgtccggaaggggacccccgaatgttctcagccttggaagatctattctagaaagactacaactcaaagtctgagaggtggactgcccaagcctaacaaagctgtcccgatgaaggtcagtgagcacagtcttctccccttgatgttggagcagttcccctttctgtacgtttctggacctactctttccaagatgtggaaacaacagatcgcacaagtcgagcaacttaagaaggaggcttgtcgcgagaatcgaagcaaaaaaaagctgcaagatgagatcgaagaggccctgcgcaggcatgacttgcttactaccttggtaaaaaaagaatatgaacacaacaagaggcttcaggacttcaaggactgcataagacgacagcggcttacacaaagtaagattaaagagaataggcagcagatcgtgagggcgaggaaatattacgacgattatcgtgtgcagctttgtgctaagatgatgcgaatgcgaacaagagaagagatgattttcaagaagctgtttgaggaaggcctcaatatacagaagcagagactccgcgatctacgcaattacgctaaagagaaacgagatgagcaacgtagacggcaccaggatgaactagattccatggagaattactacaaggatcagtttagcctactggccgaggcaatttctcaggaacatcaggaattaaaggccagagagaagagccaggcccagacattgcacaaagtgaagagagagctgcgatccaagatggagaaagagattcagcagcttcaggatatgattacacagaacgatgatgatgtctttttccgtgagctggaagccgaaaggttcaggagccgcctccagttagcctcatttcaatatagcaaatcaccctccctgtag

SEQ ID NO: 31662 - DNA, 507 bp, synthetic construct
  source 1..507: mol_type = other DNA; note = Synthetic coding sequence
atgcagacatttctcaaaggaaagagagtcggctactggcttagtgagaagaagattaaaaaactcaactttcaggcattcgccgagctgtgtcggaaacgagggatggaggtcgtccaactaaacctttcaagacctatagaggagcaaggcccacttgacgttatcatccacaagctgacagatgtgatcttggaggcagaccaaaatgacagccagtccctggagctagtgcaccggtttcaggaatatatcgatgcccatccagagactattgtgttggacccactgcccgcaatccgtacactactagacaggtccaaatcgtatgagctcattcgaaaaatcgaggcctatatggaagatgaccggatatgttcaccccctttcatggaactcacctccctgtgtggcgatgatacaatgagacttttggagaaaaacgggctgacctttccctttatctgcaaaacccgggtggcccacggcacaaattcccatgagtag

SEQ ID NO: 31663 - DNA, 2211 bp, synthetic construct
  source 1..2211: mol_type = other DNA; note = Synthetic coding sequence
atgttgattccggcactgcagattagtgactctgagagcgtgggcctagaggatggcatcgagcagtcagcctacctgaccgagtctaaaatgaatgagagtaagccaggagattcccaaaatctggcctgcgtgttctgtagaaaacatgatgattgccccaacaaatatggtgagaaaaagaccaaagagaaatggaatttaaccgtgcattattattgtttgctaatgtccagcggcatttggcagcgcggaaaggaagaagaaggagtctacggattcctgatcgaagatattcgcaaggaggtgaaccgggcttcaaagctcaaatgttgcgtgtgtaagaagaatggtgcatccatcggatgcgtggctccgagatgtaaacgctcatatcattttccctgcgggctccagcgggagtgcattttccagttcaccggcaactttgctagcttttgttgggaccacagaccagtccagatcattaccagtaacaattaccgagaaagcctcccatgcactatctgcctggaattcatcgaaccgatcccgtcatataacattctccggtcaccatgctgtaaaaatgcatggttccatcgagattgtctccaagtgcaagccatcaatgctggtgtcttctttttccgctgtaccatatgcaacaacagcgatatcttccagaaagaaatgcttagaatgggcatccacattccagaaaaagacgcctcctgggagttggaggagaacgcttatcaggagttactgcaacactacgagcggtgtgacgtgcgaagatgtcgatgcaaggaaggtagggactacaatgcccctgattccaaatgggaaatcaaaagatgtcagtgttgtgggagttctggtacacatctggcctgttcaagcctgcggtcttgggagcagaactgggaatgtcttgagtgtaggggcattatatacaattccggcgaatttcagaaagctaagaaacacgtcttgcctaattctaataatgtgggaattactgattgccttctggaggagtcctcccctaagcttcctcgtcagtccccgggatctcagtccaaggacctgctgcggcagggcagtaagtttcgcaggaacgtgtctactctcctgatagagctcggttttcagattaaaaagaagaccaagcggctctatattaacaaggcgaatatttggaatagcgccctggacgcctttcggaaccgcaacttcaatccgtcttacgccatcgaggttgcctacgtaatcgagaacgacaacttcggaagtgagcacccaggcagcaagcaggaatttctgagcctgctgatgcaacatctcgaaaacagttccctgttcgagggaagcttatccaagaacttgtctttgaatagtcaagcccttaaagagaacttgtactacgaggcgggtaaaatgttggccatttcacttgtgcatggcggtccaagccccggttttttttccaagaccctcttcaactgcttggtgtatggtccggagaatactcagcctattctggatgacgtatcagattttgatgttgcccagatcattatccgcataaatacagccaccacagttgcggacttaaagtccattattaacgaatgctacaattaccttgagcttatcggctgcttacgactgataacaactctctctgataagtatatgctagtcaaggacatccttgggtatcatgtgatccagcgcgtgcacacgccttttgagagttttaaacaggggttaaaaaccttaggtgtgcttgagaagattcaggcgtaccctgaggccttttgcagtatactctgtcacaaacctgaaagtctatccgccaagatcctatcggagctattcaccgtgcatacgctgcccgacgtcaaagccctcggcttctggaactcatatctccaggcggtggaggacggaaagtctacgacaaccatggaggacatcctgatctttgcgaccggatgctcctccatcccccctgccggattcaagcctacgccaagcatcgaatgccttcacgtcgacttcccagtcggtaataaatgtaacaattgcctggctatcccaataacgaacacatacaaagaattccaggaaaacatggactttacaataaggaacacactgcgcctggaaaaagaggaatccagccattatatcggtcactag

SEQ ID NO: 31664 - DNA, 1131 bp, synthetic construct
  source 1..1131: mol_type = other DNA; note = Synthetic coding sequence
atggccaactctgccaataccaacaccgttcctaaactatatcgatctgtgattgaagatgtgattaatgacgtgagggacatcttcctggatgatggggtggacgagcaggtgctaatggagctgaagaccctttgggagaacaagctgatgcagagcagggcagtcgatgggtttcattccgaggagcagcaactgctgttgcaagtgcaacagcagcaccagcctcaacagcagcagcaccaccaccaccaccatcaccagcaggctcagccacagcaaactgtacctcagcaagcacagacacagcaggtgttaatccccgcatctcagcaggcaactgctcctcaagtgatcgtgccagactcaaagttgatccagcacatgaacgcctctaacatgagcgccgctgcaacagccgcaaccttagccctgccagccggtgtgacaccggtgcaacaaattctgaccaactctggccagctcctgcaggtggttcgagctgcaaacggtgctcagtatatattccagccccagcaatccgtagtcctacagcagcaggtgattcctcagatgcaaccaggtggagtccaagcaccagtgatacaacaagtgctggctccactcccagggggtataagcccacagacgggggtgattatccagccccagcagattttatttaccggaaataagacacaggtaataccgacaacagtggcagccccaacgccggctcaagcccagatcactgccactggccagcagcagccccaggctcagcccgctcagacacaggcccctcttgttttgcaggtggacgggaccggggacacatcatctgaggaagacgaggacgaagaagaggactatgatgatgatgaagaagaagacaaggagaaggacggcgcagaggacggtcaggtcgaggaggagcctctgaacagcgaagacgatgtctccgacgaagagggccaagagctgtttgataccgaaaatgtggtggtctgtcagtacgacaaaatccatcggtcaaagaataaatggaaattccacctaaaagacggaataatgaatctcaacggacgagactacatcttctctaaagcaattggagatgctgaatggtag

SEQ ID NO: 31665 - DNA, 237 bp, synthetic construct
  source 1..237: mol_type = other DNA; note = Synthetic coding sequence
atggaaacagattgcaatccaatggaactttctagcatgtccggctttgaggaagggagtgagctcaatggttttgaaggcactgacatgaaggatatgcggctagaggctgaggctgtggttaatgacgtgcttttcgcggttaataacatgtttgtcagcaaaagtctgaggtgcgccgacgacgtagcctatataaatgttgaaaccaaagaacgtaaccgctattgtttgtag

SEQ ID NO: 31666 - DNA, 747 bp, synthetic construct
  source 1..747: mol_type = other DNA; note = Synthetic coding sequence
atggccttttccggccgagctagaccctgtattatccccgaaaatgaggaaatacccagggctgctctcaataccgtgcatgaagccaacggtaccgaggacgaacgagccgtgtcaaaactgcagcgaaggcattccgatgtgaaggtctataaagaattttgcgatttctacgcgaaattcaatatggcaaatgccctcgccagtgctacctgcgaacggtgcaaagggggatttgcccctgccgaaactattgtgaatagtaatggggagctctaccacgagcaatgcttcgtttgcgcccaatgctttcaacagtttcctgagggcctgttctacgaatttgagggtcgtaaatactgtgagcacgacttccaaatgctattcgcaccctgttgccaccagtgcggggagttcataatcggtcgagtgattaaggccatgaacaactcttggcaccccgaatgtttcaggtgcgacctgtgccaggaggtacttgctgacattggcttcgtcaaaaacgctggacggcatctatgtcggccttgtcataatagggaaaaagccagggggctgggcaaatacatttgccagaagtgccacgcaattattgacgagcagcccctgatcttcaagaatgacccctaccatcccgaccactttaattgcgccaactgtggccaggagggaagtgactgccggtgtactggcgctgagaggggagccattctgcctgctatgccttag

SEQ ID NO: 31667 - DNA, 2370 bp, synthetic construct
  source 1..2370: mol_type = other DNA; note = Synthetic coding sequence
atgagtgcccagacctcacctgcggaaaaagggctgaatccaggcttgatgtgccaggaatcttacgcctgctctggtaccgatgaggctatctttgagtgcgacgaatgctgctccctgcagtgtctgcgctgcgaagaggaactgcataggcaggagaggctgaggaaccatgagagaattaggctgaaacctggacacgttccgtactgcgacctgtgcaagggcctttctggacatctgcccggtgtgcggcaaagagcaattgtcagatgtcagacatgtaagattaatttgtgtctggagtgtcaaaagagaacccattcaggcggaaacaagcgccgacaccctgttaccgtgtataatgtatctaatttgcaggaatccctcgaagccgaagaaatggatgaggaaacgaagagaaagaagatgacggagaaagtcgtgtctttcctgttggtcgatgaaaatgaagagatccaggtcaccaatgaggaagatttcattaggaaactcgattgcaaaccagaccagcatttaaaggtcgtgagtatatttggaaacactggagacgggaagagccacaccctgaaccacacattcttttacggcagggaggtgtttaagacatcacccacacaagaatcctgcaccgttggcgtgtgggccgcttatgatcccgtgcataaggtggccgtaatagacaccgaaggactccttggggctactgtgaacctgtcacagaggacccgactactgttaaaagtgctggcaataagcgacctggtaatctaccgaacccatgctgaccgtcttcacaatgacttgtttaaattcctgggcgatgcgagcgaggcgtatctgaagcattttacgaaggaactcaaggcgaccaccgcacgttgcgggctggatgtgcccctcagtacattaggcccagccgtcattattttccacgaaactgtgcacacgcagctgctcgggagcgatcacccatctgaagtgcccgagaaactgatccaggaccgcttccgcaaattagggaggttccccgaagcattttcctctatccactacaaaggaactagaacatacaacccacctacagacttctctgggttgcgcagggcgcttgaacagttgctggagaacaatacgacgcggtcacccagacacccgggtgtgatcttcaaagcgttgaaggctctgtcagaccgtttttctggcgaaatccccgatgatcaaatggcgcattcttcgttttttcccgatgagtacttcacatgctccagtttatgcctgtcttgcggcgtcgggtgtaagaagtctatgaatcatggaaaggaaggagtccctcacgaagccaaatccaggtgtcgctactcgcaccagtatgataatagagtctacacctgcaaggcgtgttacgagcggggagaggaagtgtccgtcgtgcctaagacttctgcaagcaccgactctccttggatgggattggctaagtacgcatggagcggttatgttatcgagtgtcccaattgcggcgtcgtgtatagatccaggcagtattggtttggtaatcaggatccggtggacactgtggtaaggacggaaatagttcatgtgtggccgggtaccgatggattcctgaaagataataataatgccgctcagcgattgctggatggcatgaacttcatggctcagtccgtaagcgaactgagcctaggccctacaaaggccgtcacctcctggcttacagaccaaattgcgcctgcatactggcggcctaacagccaaatcctaagttgcaacaagtgcgctacctcattcaaggataacgacacaaagcatcattgcagagcttgtggtgaggggttttgtgatagttgctcctctaaaactcggcctgttccagagcgcggatggggccctgccccagtgcgggtctgtgacaactgctacgaagcacgcaacgtacagctggctgtgacagaggcccaggtggatgatgaaggcggaaccctgatcgccagaaaggtgggtgaagctgttcagaatactttgggcgctgttgtcactgcaatcgacatccccctgggactcgttaaggatgctgctcggccagcctactgggtgcctgatcacgagatcctgcattgccacaattgcaggaaagagttttcaataaagctgtcaaaacatcactgccgggcatgcggacagggcttctgcgatgagtgcagccatgaccggcgtgcggtaccctcacgtggatgggaccaccctgtgcgagtgtgttttaattgcaataagaagcctgcatggacatccttgagcgtgatgactggcaaaggccctctctgctag

SEQ ID NO: 31668 - DNA, 2271 bp, synthetic construct
  source 1..2271: mol_type = other DNA; note = Synthetic coding sequence
ctggcgggtaatgaaaccgagtgggtgacaattgctaacaatctgctgttcaaatgtcacatccacctcagaatccatgagctacaagactgtgatgccaatgtgtttatcgctctgtaccagtccatactgggcgaaaaggtgcctgatctgatcgttatacctcggtcacaggaggacgacgcacataacgtgcaggccgtgatcgattctctcgccttggattacttacaggtgagcctcagtcacatcactgccctgtacagtgtgtctcgtcgtaagtatagtgagaggagaatgttgggacccagttgggatggtgacgaagcagaaagtacaggagagataatacgccttggggataccgctcacaccttctctctccggagtaacggagcacagtgtcccaatgagatgttaagtaaaaaggccttggcatcaccatcaagcaaaagtcatgaagacatgctctacccaccttccgtgctgagcaaaagcagaacctccttcgtggaggacaccgaaacactttcagtgtctggcatcccgaatgcaaggaaactgggggaaccaatcagagccgctatcccccttcatccaccataccatccatctgaaccacgcgcaccatgcccaattggaaaggaatacttgcatagctctcattgttcccctgcagtaaacagcactggagaacacactgagttttcaggtgatctggatgatggactgttcctgatctccaagttacccaaaggctctaaatgggaggtgtatcctgcccaagtccagggcccaaggacacgaaagccacctaagggaaagagaaacgaaaacagagccaccgcatccagctgcaactccccttttcctcagcgcccaaggaaaagactcacagagcaggagctgcatgatgtctccgagaaacttagtcagcgcctctcagagctcgactggatgttgaaatctgcactgggagatcgcataaaggaaaaaaccgaccacaaggaggaaaatacaggcaatgaggaggttgaagatgggacagaagagaccttaagccagcattccgatggcattgtggagtatggaccaaaaaagtctcgcccaggactatcgatgagacgcaagcccccttatcgcagtcacagcttatctcccagcccggtgaacaaacataaacaattccacctagagagaaaacgccagaggaaaccgagggagacagatgttcggcagtttcaagctcaggctttcacggaggcattcgagcgggagcttagacgtcataaagttcaggagaacatcggtcctcttcgcattcatgaaaaagaagaggagacagttggcaagaacattcagaggagaagtttcgtgaaggagctccaaaacgtggtgagtccgggtcgatttacactagagaagccccagcgtcgggtgaggggtggcttgccaaagccaaataaggctgtgcccatgaaggtttccgaacactctctattacctcttatgcttgaacaatttccattcctgtatgtgtctggcccaactctgagtaaaatgtggaagcaacagatagcgcaggtcgaacagcttaagaaagaagcgtgtagggagaacagaagtaagaagaaactgcaggatgagatcgaagaggcccttaggcgacacgatctgttaaccactcttgttaagaaggaatatgagcataataagagactccaggactttaaggattgcattcgacggcagcggctgacacagagcaaaatcaaagagaaccggcagcaaatcgtgcgggctcgaaagtactacgatgactaccgagtacagctatgcgccaagatgatgaggatgcgaactagagaggagatgattttcaaaaaattgtttgaagaaggccttaacattcaaaagcagcgcctcagggacctgaggaactatgccaaagaaaagcgggatgaacagagacggagacatcaggatgaactggatagtatggagaactactacaaagatcagttcagcctgctggcagaagcaataagtcaggagcaccaagagctgaaagccagagagaaatcacaggcacagactttgcataaggtgaaaagagaactccgcagcaaaatggaaaaggagattcaacagctgcaggatatgatcacccagaacgatgacgacgtgttcttccgggaacttgaggccgagcggtttcgctcccggcttcagctcgcatcattccagtactcaaaatcgcctagtctgtag

SEQ ID NO: 31669 - DNA, 420 bp, synthetic construct
  source 1..420: mol_type = other DNA; note = Synthetic coding sequence
atggagaccgattgcaacccaatggagctttcaagcatgtcaggtttcgaagagggttctgagctcaatggttttgaaggcactgacatgaaagacatgagactcgaggccgaagctgtcgtgaatgacgtactctttgccgtcaacaatatgttcgtttccaagtcactccgatgtgctgatgacgttgcctacattaatgttgagaccaaggaaagaaacagatattgtctggagctcacagaggctgggctcaaggtcgtgggctacgctttcgaccaggtggatgatcatttacagactccctaccacgaaacggtgtattctctcctcgatacgctttcacctgcataccgggaggcttttggcaacgccctattgcagagattggaagctttgaagcgcgatggtcaaagttag

SEQ ID NO: 31670 - DNA, 300 bp, synthetic construct
  source 1..300: mol_type = other DNA; note = Synthetic coding sequence
atgaccgatacacgcaggagggtcaaggtgtatacccttaatgaagacagacagtgggacgaccggggtactggccatgtttcctctggatacgttgaacggctgaaaggaatgagcctcctagtgagagccgagtctgatggttctctgctgttggagtctaaaatcaaccctaatacggcctatcagaagcagcaggatacactgattgtctggtccgaagcagagaattatgatcttgcgctgagtttccaggagaaagccggttgtgacgagatctgggagaaaatctgccagtag

SEQ ID NO: 31671 - DNA, 2463 bp, synthetic construct
  source 1..2463: mol_type = other DNA; note = Synthetic coding sequence
atgactgatactaggagaagagtgaaagtgtataccctcaacgaagaccgacagtgggatgaccgcggaacaggtcacgtgtcctccggctacgtggagcggctgaaaggaatgtcactacttgtaagagcggagagtgatggctctttactgctggagtccaagatcaatcccaacaccgcctaccagaagcaacaggatacattaatcgtttggagcgaggcagagaattacgatcttgccctcagttttcaggagaaagctgggtgtgacgagatctgggagaagatctgccaagtgcagggaaaggacccaagcgtggacatcacgcaagatcttgtggatgaaagcgaggaggagcgatttgatgacatgtctagccctggcttagaattacccagctgcgagctgtccagactggaagagatcgctgaactcgtagccagttctttgcctagtcctctgaggcgcgaaaaactggctctggctctggagaacgagggctacatcaaaaagttgctggaactgttccacgtgtgtgaggacctagaaaacatcgaaggtctgcatcacctgtatgaaattataaagggaatcttcttactgaaccgaactgccctgtttgaggtgatgttttccgaggaatgtatcatggacgtgatcgggtgtttagaatacgatcctgctctttcacagccacgtaagcaccgtgaatttttgaccaagaccgccaagttcaaagaggtgatccccatctctgatccagaactgaagcagaagatacaccaaacataccgagtgcagtatatacaggatatggtgctacctacaccctccgtctttgaggagaacatgttgagtacattacactccttcattttttttaacaaagtcgagatagtggggatgctgcaagaggatgagaagttcttgacagatctattcgcccagttaacggatgaggccacagatgaggaaaaacgacaggaactggtcaacttcctgaaagagttttgcgcattctcccagaccctgcaaccacagaatagggacgccttcttcaagactctctccaacatgggcatcctgccagcactggaggttatcctggggatggatgacacccaggtcagaagtgccgctactgatattttttcctacctcgtcgagtacaacccctctatggtgagagaatttgtcatgcaggaagcccagcaaaacgatgacgatatactgctgattaacttgataatagagcatatgatctgcgatactgaccccgagttgggaggtgccgtccagctgatgggccttcttaggactcttgtcgatccagaaaatatgcttgcgaccgccaacaaaacagagaagaccgagttcttagggtttttctacaaacattgtatgcacgttctcactgcccctcttctggctaacacgacagaggataagcccagcaaagatgactttcagacggctcagttactggcactggtgctggagcttttaacattttgcgttgagcaccatacatatcacatcaagaattatataatcaacaaagacatcctccgcagggtcctcgtactgatggcttccaaacatgcgttccttgccctctgtgcgctgcgctttaagcgcaagatcataggcctgaaggatgagttttataaccggtacataatgaaaagttttctgtttgagccagttgttaaagccttcttgaataatgggtcccggtacaatctgatgaattctgcaatcattgaaatgtttgagtttatacgtgtggaagacatcaagagcctgaccgcacacgtaatagaaaattactggaaggctcttgaggatgtcgattacgtacagacttttaaggggctgaaactgagatttgagcagcagagagaaagacaggacaacccaaaactggactctatgcgaagcatcctgcggaatcatagatacaggagggacgccaggaccttggaagacgaggaagagatgtggttcaacacagacgaggacgacatggaggatggagaggcggtcgtgagtccatcggacaaaaccaaaaacgacgatgatataatggaccctatctccaaattcatggagcgcaagaaacttaaggagagtgaggagaaagaggtgcttcttaaaaccaatctttctgggcgacaaagcccatccttcaagctgagcctgtcctccggtaccaaaacaaacctgacctctcagagctccacgacaaacctccctggtagccctggaagtcctgggtctccaggcagccccggatccccgggttccgtgcctaagaacacctcccagactgctgcaatcacgacaaaggggggtctcgttgggttggtcgactatcccgatgacgatgaggatgacgatgaggatgaagacaaggaggacacgctgcctctgagcaaaaaggccaaatttgactcgtag

SEQ ID NO: 31672 - DNA, 396 bp, synthetic construct
  source 1..396: mol_type = other DNA; note = Synthetic coding sequence
atgaacgaatctaagcccggagattcccaaaatctggcctgcgtcttctgtcgcaagcacgacgattgtcctaacaagtatggagaaaagaaaaccaaggagaagtggaatttgacagttcactattactgcctgctgatgtcctcaggcatttggcagcgtggtaaggaagaggaaggagtgtacgggtttttaattgaggacattagaaaggaggtgaaccgcgcatcaaaactgaagtgctgcgtgtgtaagaagaatggtgcctccatcggatgcgtggccccacggtgcaaacgtagctatcatttcccttgtggtcttcagcgcgagtgtatcttccagtttactggaaatttcgcttccttttgctgggatcaccgaccagtccaatag

SEQ ID NO: 31673 - DNA, 5933 bp, synthetic construct
  source 1..5933: mol_type = other DNA; note = Synthetic coding sequence
atggcggcaagaagtgcacctagttgccacttaagactagaatgggtgtacggctaccgtggccaccagtgccgaaataatctatattacacagccgcaaaggagattgtctacttcgtggctggagtgggcgttgtgtattcccccagggagcatagacagaagttctaccgtggccactccgatgacatcatcagccttgccctccacccagaaagggtgctcgttgccactggccaggtgggaaaggagccctacatctgtatctgggattcttacaccgttcaaacaatctccgtgctgaaggatgtgcacacgcacggaatagcatgtttggccttcgacctggatgggcagaggctggtgtcagtagggctggattcaaaaaatgccgtgtgcgtttgggattggaaaagagggaaaatgctcagtatggccccaggtcacacggacagaatttttgacatatcttgggatctgtatcagcctaacaagttggtctcatgtggtgtgaagcacataaagttctggtcactgtgcggcaacgcactcacccccaagagaggcgtctttggtaagaccggcgatttacaaacgatactttgcttggcatgcgccagggatgagcttacttattccggggctctcaatggcgacatctatgtgtggaagggcatcaacctgatccggaccatccaaggggctcacgcggctgggatcttcagtatgaatgcatgcgaggaaggatttgctacaggagggcgagacggctgcataagattgtgggacctcacttttaagccaataactgtaatcgacctgcgggagacagatcagggatacaaggggctgtctgtccgcagcgtgtgttggagaggtgatcacatccttgtggggacgcaggacagcgaaatatttgagattgtcgtacaggaacgcaacaagcctttcctgataatgcaggggcactgtgagggtgaattatgggccttagcagttcaccctacaaaacctctggctgttaccggttcagatgataggtccgttcgcatttggagcctcgtggaccatgcgctaatcgcacgatgcaacatggaagagcccataagatgtgcagccgtgaatgccgatgggattcacttagccttgggcatgaaagacggttccttcacagtgctcagagttagggatatgacagaggtcgtgcatataaaagacagaaaagaggctatccatgaactcaaatactcccccgacgggacctatctggccgtgggatgcaacgactcctcagtggatatctacggagtggcgcagaggtacaaaaaggtgggcgaatgcctgggatccctgtcttttattacgcacttggactggtcctcggactcacggtacttacaaaccaacgacggaaatggtaagcgcttgttttatcggatgccgggtggaaaggaggtgactagtaccgaggaaatcaaaggcgtacattgggcatcctggacctgcgtcagcgggctggaggtgaatgggatctggccgaaatactcggatattaacgacattaacagcgtagatggcaactatatcggacaagtgcttgtgaccgcagacgattatgggattataaagttgtttcgctacccttgtctccggaaaggagctaaattccggaagtatattggacactcagcccatgtcactaacgttagatggagccacgactatcagtgggttatctctatcgggggagccgatcattcagtattccaatggaagttcattcccgagcgcaagctgaaggacgccgtgcatatcgcccctcaggaatctctggctgacagccattcagacgagtcagactccgatctgagcgatgttcctgaattagactccgagatcgagcaggagactcagctgacatacagacggcaagtatacaaagaagatctgccccagttgaaggaacagtgtaaggaaaagcagaagtccgcgaccagcaaacggagagaacgagcccctggaaattctattcgcctgcattttgtccacggctatcggggttatgactgcagatccaacttgttctacacccagataggcgagatcgtctatcacgttgctgctgtgggcgtaatctataacagacagcagaatacacagagattctatttaggtcatgacgacgacattctctgtttgacaatccacccattaaaggattatgtcgctactggacaggtaggacgcgacccatccattcacatatgggatacagagaccatcaagccactgagcatcctgaagggtcaccaccaatacggagtgtcagccgttgactttagcgcagacggaaagcggcttgcctccgtggggatcgatgatagtcatacggtagtgctttgggattggaaaaagggcgagaaactgtcaatcgctcgcggtagcaaagacaaaatctttgtcgttaagatgaatccatacgtgccagataaactcatcacagcagggataaagcacatgaaattctggaggaaagcaggaggcggactaattgggagaaagggatatatcggcacactggggaaaaacgatacaatgatgtgcgctgtgtatgggtggaccgaagaaatggctttcagcggcacatccacaggggacgtctgtatctggcgagatatatttctggtgaagacagtcaaggcacatgacggacctgttttctcaatgcacgccctggaaaaaggctttgttactgggggaaaagacggaatcgtggcgttgtgggacgacagtttcgagcggtgcctcaagacctacgccatcaagcgtgcggcattggctcccggaagtaagggattactgctcgaagataatccctctatccgggctataagcctgggccacgggcatattctggtgggtactaagaatggggagatcttggaggtcgacaaatccggcccaataactctactggtccagggacacatggaaggcgaggtgtggggtctagcaacacatccttatctacctatttgcgctactgtgtcagacgacaaaacgctgcggatctgggatctcagtcctagtcattgcatgctggccgtgcggaaactcaagaaagggggacgatgctgttgtttcagccccgatggaaaggctcttgcagtcggactgaatgatgggtcattcttgatggctaatgctgacaccctcgaggacctggtttcttttcaccaccgcaaggacatgatttccgacattcgcttctcgccaggcagtgggaagtatcttgccgttgccagtcatgactctttcattgacatctataatgttatgtcaagcaaacgggtgggtatttgtaagggcgcaacctcttatatcacccatatcgactgggatatccgcggtaagttgctgcaggtgaacactggcgcaaaggaacaactctttttcgaagctcctagaggcaagaaacaaacaattccatctgtcgaagtggagaagattgcctgggcgtcatggacgtctgtgctgggcctgtgttgcgagggcatctggcccgtgatcggcgaagtaaccgacgtgactgctagctgcctgacatctgataagatggtgctggcaaccggggacgatctaggctttgtaaagctgtttaggtaccccaccaaaggcaagtttgggaagttcaaacgctacgtggctcactctacacacgtgacaaacgtaaggtggacttacgatgattcgatgctggtaacgctggggggaacagatatgtccctgatggtatggactaacgaaatggaaggctacagagagaagagaccgtgtgattccgaagagtccgacattgacagtgaggaagatggaggttacgattccgatgttactcgggagaatgagatttcatatactatccgggctttgagcaccaacattcggcctatgctgggcataaagcctcatttacaacagaaggaaccaagcattgatgaacggcaaggtgtcgtgaggggaagcaggcccccagtttcccgggctccccctcagcctgagaagctgcagaccaacaatgtgggaaaaaaaaaacggccaatagaagatcttgtgctggaactcattttcggctatagggggcgagactgccgcaacaatgtgcactacctgaacgatggcgacgacattatctatcatactgccagcgtgggaatcctccacaacgttgccacaggtagtcaaagtttctaccaggaacataatgacgacatcctgtgcctgaccgtgaatcagcaccccaaatttattaacatcgtggcgactggccaagttggtgactcagctgacatgagtgccacagccccaagcattcacatttgggatgccatgaataaacagacccttagcattctacggtgttatcattccaaaggcgtgtgcagcgtttctttctcagccacgggtaaactgttgctctccgtgggcctcgatcctgaacacactattacaatctggcgctggcaggagggagcgaagatcgctagcagagctggtcacaaccagcgcatcttcgtggctgagttcaggcccgactccgatactcaatttgtttcggtgggcgtcaaacatgtgaagttttggaccttggccggaagagccctcctaagtaagaagggcttactctccaccctagaggacgccagaatgcaaacgatgctggccatcgctttcggagccaataacttaacattcactggcactatctctggggatgtgtgtgtgtggaaagaccatattctgtgtaggatcgtggcgagagcacataacgggcctgtgttcgccatgtacactaccctcagagatggtttaatcgtaaccggcggaaaggaaaggccaagcaaggagggaggggctgtgaagctgtgggaccaagaactacgcaggtgtcgcgctttccgtttggaaacagggcaagcgaccgactgcgtacgctcagtatgtaggggcaagggtaaaatcttggtgggtacccggaatgccgaaatcatcgaagtgggtgagaaaaatgccgcatgtaatatcctggtcaatggccacgtagacgggccaatctgggggctagcgactcatccctctagggatttttttctgagcgctgcagaggatggcactgtccgcctctgggatattgcagataaaaaaatgttgaataaggtcaatctggggcacgccgctcggacagtctgctactcgcccgagggcgatatggttgccatcggcatgaagaatggtgagtttataattctgttggtgtcatccttgaagatctggggcaagaagagggataggagatgcgcgattcacgacattcgtttttcccctgacagtcgctaccttgccgtgggttcttctgagaattcagtcgatttctatgacctgactctaggtcccacactaaacagaattagttattgcaaggatataccttcgttcgtgatccaaatggacttcagcgccgattcgtcttacctgcaagtatccagcgggtgctacaaacggcacgtatacgaagtaccatctgggaaacatctgatggatcacgcagccatcgatagaatcacctgggcaacctggactagtattctcggcgatgaggtgctgggcatctggtctaggcatgcagaaaaggccgacgtcaactgcgcctgtgtgagccactctgggatttcccttgtcactggcgatgacttcggcatggttaaactgtttgacttcccctgccctgagaagttcgccaagcacaagcgcttcctggggcattctcctcatgtaacgaacatcaggtttacgagcggcgataggcacgttgtctcagccggaggtgatgactgcagcctctttgtgtggaagtgcgtccatacccctcatta

SEQ ID NO: 31674 - DNA, 2502 bp, synthetic construct
  source 1..2502: mol_type = other DNA; note = Synthetic coding sequence
atgacagacactcgcaggagagtgaaggtctacactctgaatgaagacagacagtgggacgatcgcggaaccgggcacgtgagcagcggctatgtcgagagactaaaggggatgtccctcctggttcgggcagagtcagacggctccctactcctggagagtaaaattaaccccaatactgcctaccagaaacaacaagatacactaattgtgtggtctgaggcggagaattacgatctggccctgtcattccaagaaaaggccggttgcgacgaaatctgggaaaaaatttgccaggtccaaggcaaggacccatctgtggatattacacaggacttagtggatgagtccgaggaagagcgatttgatgacatgtcctctccagggctggagttgccgagctgcgaattatctcggctggaagaaatagccgagctggtggcttccagcctgccaagtccccttagacgagagaagctggcactggctttggaaaacgaggggtacatcaagaagttgctggagctttttcacgtgtgcgaggatcttgaaaatattgagggcctgcatcatctctacgaaattattaaaggcatcttcctgctgaatcggactgccctgttcgaggtgatgttttccgaggaatgcatcatggacgtcatcggatgcttagaatatgatccggctttatcacagcctcggaaacatagggaatttctgaccaagactgcgaaatttaaggaggtgattcctatttctgaccctgagcttaagcagaaaatccaccaaacctacagagttcagtacatccaggatatggtgctacccacaccgagtgtattcgaggaaaacatgctgtcgacgctgcattcatttatcttcttcaacaaagttgaaattgtgggcatgctccaagaggatgagaagttcctgaccgacctctttgcccagctgactgatgaagccactgatgaagagaaacggcaagagctcgtaaactttctgaaggaattttgtgcattttcccaaacactgcagccacagaacagggacgcatttttcaaaacactcagcaatatgggcatcctgcctgctcttgaggttatcctgggcatggacgacacacaggtccgcagtgcagccacggacattttctcttacctcgtcgaatataaccctagtatggttagggaattcgttatgcaggaggctcaacaaaacgacgacgtgtcaaagaaactcaccgaacagaagattacgtccaaagacatccttctgattaacctcatcatcgagcatatgatatgcgacacggatccagagctgggcggagcggttcagcttatgggcctgctccgcacgctggtggatccagaaaatatgttggcaaccgcaaataagacagaaaagacagaattcctgggctttttttacaaacattgcatgcacgtactcacagccccattgctcgcaaataccaccgaggataaaccctccaaagatgattttcagacggcgcaactgctagctctggtactcgaacttctgactttctgcgtcgagcatcacacctatcacatcaagaactatatcatcaacaaagatattctgcgcagagttcttgtgctgatggcttctaaacatgctttcctggcactatgtgcgctgaggttcaaacggaagattatcggtcttaaagacgagttctacaacaggtatatcatgaagtccttcctgttcgagcctgtggtgaaggcatttctgaacaatggcagcaggtacaatctgatgaattctgccatcattgaaatgttcgagtttatacgcgtcgaggatattaaaagcctgacagctcacgtgatagagaactattggaaagccctcgaggatgtggattacgttcagacgttcaaaggactcaagctacgcttcgagcagcagagggagaggcaggataatcctaaactcgacagcatgagatcaatcctcagaaatcacagatataggagggacgcgaggacacttgaggacgaagaggagatgtggtttaatacagatgaggacgatatggaggatggggaagccgttgtgtcaccatccgataagactaagaatgacgatgatatcatggatccgatcagtaagtttatggagcgaaagaaattgaaggaaagcgaagaaaaggaggtgctgctgaagactaacctctccggacgacaatccccaagctttaagctgtctctaagttccgggaccaagacaaatctcactagccagtcttcaacaacgaatctccccggaagccctggcagccccggttcaccaggcagtccagggtctcccggaagcgtcccgaaaaacacaagccaaaccgccgctatcactactaagggcggattggtgggcttggtcgattaccccgatgacgatgaggacgatgatgaagatgaagataaagaggatactttacccctgagtaagaaagctaagttcgattcatag

SEQ ID NO: 31675 - DNA, 3987 bp, synthetic construct
  source 1..3987: mol_type = other DNA; note = Synthetic coding sequence
atgtggagacgaaagcatccacgcacttctggcggaactcgcggtgtgctgtccggaaaccggggagttgaatacggctccgggagaggacaccttggcactttcgaaggcagatggagaaaactacctaagatgcctgaggcggtagggacagacccctccacttctcgaaaaatggccgagctggaagaggtgacactcgatggaaaacctcttcaggccttacgtgttacagaccttaaggccgctcttgagcagcgcggtctggctaagagcgggcaaaaatctgcactcgtgaagagactgaagggggctctcatgttggagaatttgcaaaagcatagtacaccacacgccgctttccaaccaaacagtcagattggagaagaaatgagccaaaacagctttatcaagcagtatttagagaaacagcaagagctccttagacaacggttggagcgggaagcgagagaagccgcagagctcgaagaggcctcggcagaatccgaggacgaaatgatacatcccgagggtgtggcttccctactccccccagacttccagtcaagcctggagaggcccgaactggaactgtctagacacagtccccgtaagagcagcagtatatcagaagaaaaaggggattccgatgatgagaagcccagaaagggggagaggaggagcagtcgggtgcgccaggccagggccgctaagctgagtgaggggtcgcaacccgctgaagaggaagaagaccaggagacgcccagtaggaatctgcgggttagagcggaccgcaacctcaaaacagaagaggaagaagaagaagaggaggaagaagaggaagatgatgaagaggaggagggggatgatgaggggcaaaagagtagggaggctccaatacttaaggagttcaaggaggaaggcgaggagattcccagggtaaaacccgaggaaatgatggacgagagacccaagacccggtctcaggagcaggaagtgctggagaggggtgggagattcactcggagtcaggaggaggcaagaaagagccatctggcaagacaacaacaggaaaaggagatgaaaaccacttccccgcttgaggaagaagaacgcgagattaaatcgagccagggcttgaaggagaagtcaaagagtccgtccccccctagacttaccgaggaccgaaagaaggcatctctggtggccctgccagaacagacggcgtccgaagaagaaacaccgcctccactgctcaccaaagaagcttccagtccccctcctcatcctcagctgcattctgaagaggaaatagagccaatggaagggcctgctcctgccgtcctgatccagctgagtccacctaacactgatgctgacactcgcgaactgttggtgagccagcacactgtccagctagttggtgggctttcacctctttctagtccttcagacaccaaggccgaaagtcctgcagagaaggtgcctgaggagtccgtgttacccttagtacaaaagtctacactcgcggattactctgcccaaaaggaccttgaacctgaaagcgaccgctccgcgcagcctctccctctgaaaatcgaggagctggcactcgccaagggcatcaccgaggagtgtcttaagcaaccttccctggaacagaaggaaggcaggagggcgagccatactctgctgccatctcacagactgaaacagagcgccgactcgagctctagccgctcttcttcaagcagtagttctagcagccgctcacggagtaggagtcctgattcctcgggcagcaggtctcattcacctttgcgctcaaagcaaagagatgtcgcacaggcaaggacccatgccaacccacgcggacgacctaagatggggtctcgatccacctcagagtctcggagcaggagccgttcaaggtctcggtcagcctcttccaacagtcgcaagagcttaagccctggcgtgtctagggactccagtacctcctatacggagactaaggacccatcttctggtcaggaagttgccacaccacccgtgccacagctacaagtttgcgaacctaaagagaggacctccacaagtagcagttctgtgcaagcgcgaagactgagtcagcctgaaagcgctgaaaagcatgtcactcagcgcttacagcctgaaagaggttcaccaaaaaagtgtgaggctgaagaggcagagccacccgcagccacccagccccagacaagcgaaacccaaactagtcatttgcctgaaagtgaaaggatacatcacacggtggaagagaaggaggaagtgacaatggacacctcagagaaccgacccgagaacgatgtccctgagccacccatgccaatcgcagaccaggtttccaacgatgatcgccctgaaggatctgtggaagacgaggaaaaaaaagagagctccttaccgaaatccttcaaacggaagattagcgtcgtgagtacaaagggcgtgcccgctggcaacagtgacactgagggcggacagcccggacgcaagcgaagatggggcgcaagcactgccaccacccagaaaaaacctagcattagcataactaccgaatccttgaaagaggccgtggttgacttacacgccgacgattcaaggatttcagaagacgaaaccgagagaaatggagatgatggtacacatgataaggggctgaagatctgccggacggttacccaagtcgtcccagcggaggggcaggaaaatggacagagggaagaggaagaggaagaaaaggagccagaagcagagcccccagtgcctccccaagtgtcggtggaagttgccttaccacctccggctgagcacgaggtgaagaaggtaaccttgggcgatactttgaccagaagaagcattagccaacaaaaaagcggtgtctctattaccatcgacgacccagtccgcactgcccaggtgccttctcctccacgcggaaagatttcaaacatcgtccacatcagtaatctggtgcgaccttttacccttggacagctgaaagaacttctgggacgcaccggcaccctagttgaggaggctttttggatcgataagatcaagtcgcattgttttgtcacgtatagcacagttgaagaggcggtagcgaccaggacagccctgcatggagtaaaatggccccaaagcaacccaaagtttctgtgcgcagattatgccgagcaggatgaacttgactatcatagaggcctcctggtggatcgtccttctgaaacgaagactgaagaacagggcattcctagacccctgcaccccccaccaccccctcccgtacagcctcctcaacatcctagagcagaacaacgggaacaggagagggccgtgagagagcagtgggcagagagggaaagagaaatggaacgccgtgaaaggacccgttcagagcgggaatgggaccgcgacaaggtgcgcgaggggcctagaagtaggtcaagatccagagatcgcaggaggaaggaacgggctaagagcaaagaaaaaaagagtgaaaaaaaagagaaagcccaggaggaacctcccgctaagctgctggatgatctgttccgtaagacaaaggcggctccttgtatctattggttgccactaaccgatagccagatagtgcaaaaggaagccgaaagagcagaaagggccaaagaacgcgagaagcgaagaaaagagcaggaggaggaagaacagaaagagcgcgaaaaggaggcagaacgagaaagaaatcgacagttagaaagggaaaaaagaagagagcatagccgggagagggatcgtgagcgggaaagagaacgtgagcgcgacaggggcgacagagatagggatcgggaacgtgatagagagaggggacgggaaagagataggcgtgataccaagcgccatagcagatcacgcagccggtcaacgccggtgcgggacagaggaggcaggcgttag

SEQ ID NO: 31676 - DNA, 1089 bp, synthetic construct
  source 1..1089: mol_type = other DNA; note = Synthetic coding sequence
atggcccactccagctttttcccagacgagtattttacatgttcttctctttgtttgagttgcggtgtggggtgtaaaaagtccatgaatcacggcaaagaaggagtgccacatgaggcgaagagccgttgtcggtattctcaccagtacgacaatcgggtttatacctgtaaagcttgttacgagcgcggagaagaggttagcgtggtaccaaagacaagcgcctctaccgactctccgtggatggggctggctaagtacgcttggtctggatacgtcatcgaatgcccgaactgcggcgtcgtctatcgctcccgacagtactggttcggtaatcaggatcctgtagataccgtagtccgaactgagattgtccacgtgtggcctggcaccgacggctttctcaaggacaataacaacgcggctcaacgcctgctcgacggcatgaattttatggcacagagtgtctccgagcttagtttggggccaaccaaagccgtaacatcttggctgaccgatcagattgccccagcctactggcgccctaactctcagatcctctcctgtaacaaatgcgctactagtttcaaggataacgacacgaagcaccactgtagggcttgtggagagggcttttgcgattcatgctcaagcaagacaaggcccgttcctgaacggggatggggccctgcaccggtccgcgtctgtgacaactgctacgaggcaaggaatgtacagcttgctgtgacggaggcacaagttgatgacgaagggggtacgcttatcgcacggaaggtcggggaggctgtccagaatactctgggtgccgtcgtgacggcaatagacattcccctgggactggtgaaggacgctgcacgccctgcttactgggttcctgatcacgagatattgcactgccacaactgccggaaagagttttctatcaagctgtccaaacatcattgccgggcatgcggccaagggttctgcgatgaatgtagtcacgaccggcgtgccgttccatctcgaggctgggaccatcccgtgcgtgtgtgtttcaattgcaacaagaagcccggtgacctttag

SEQ ID NO: 31677 - DNA, 420 bp, synthetic construct
  source 1..420: mol_type = other DNA; note = Synthetic coding sequence
atggagactgactgcaatccaatggagttatcctccatgagcggcttcgaagagggaagcgaactcaatggttttgaagggacagatatgaaagatatgcgactagaagcagaggccgtggtaaacgacgtcttatttgctgttaacaacatgtttgtgtccaaatctttgaggtgtgcggatgatgttgcatatataaacgtggagactaaggaacggaaccgatattgtctggagctaactgaagccggtcttaaagtggtaggatatgccttcgaccaggttgacgatcatctgcagacgccttaccatgaaaccgtgtattccctgctcgacacactgtcacctgcgtaccgcgaagcgtttggcaacgcgctgttacagagactagaggcgcttaagagggacggtcagtcctag

SEQ ID NO: 31678 - DNA, 2256 bp, synthetic construct
  source 1..2256: mol_type = other DNA; note = Synthetic coding sequence
atgtccgaggaggagctgaccaaagccatggaaggcctcggaatggacgaaggggatggagagggaaacatcctccctattatgcaaagcattatgcaaaatctgctctccaaagacgtcctttaccctagcctaaaagagattactgagaagtacccagaatggctgcaaagccatcgggagtcgctgccccctgaacaattcgagaagtatcaagaacagcattccgtcatgtgcaaaatctgtgaacagttcgaggccgagacacccacagattcagaaacgactcagaaggccagatttgagatggtcctggatttaatgcaacagttgcaggacctggggcacccaccaaaggaactcgcgggagagatgctgacctggctgttcttctgcggatcccaatgggtatacggaccgtggctaacatatgtcggctggctccagcagacatctttcaaaatgagtagcaaggggtcaagcaccgatggacggacggacctggctaatggctccctttctagtagcccagaagaaatgagtggggcagaggaaggacgggaaacttcgtcagggattgaggtggaggcaagcgatctgtctttaagcctgacgggcgatgatgggggtcccaaccgcacttctacagaaagcaggggcaccgatacagaaagctctggtgaggacaaagatagcgacagcatggaggacacaggtcattactcaatcaacgatgaaaacagagtacacgacaggagtgaagaagaagaggaagaggaagaagaggaagaagaagagcagccaaggcgacgagtacagaggaaacgcgcaaatagagatcaggactcctctgacgacgaacgcgctctggaggactgggtgagctctgagacatcagccctaccccgaccccgttggcaggcccttcccgctctgagagagcgggaattaggttcgtccgccagattcgtatatgaagcgtgcggcgctagggttttcgtgcagaggttccgactgcagcacgggctggaagggcacacaggctgcgtgaacacacttcatttcaatcagagaggaacttggttggcaagtggcagcgatgatttaaaggtcgtcgtttgggattgggtgaggcgtcagccggtgctggactttgagagcggtcacaagagtaatgtctttcaagcaaagtttttgccaaactccggggacagtaccttggccatgtgtgctcgggatgggcaggttagggtcgccgagctgagcgctacacagtgctgcaagaacactaagagggtcgcccaacacaagggtgcctcccacaaacttgcattggagcctgacagtccctgcacgttcctgtctgctggcgaagatgccgtggtcttcacaatcgacctccggcaggatcgaccggcttccaagctggtggtgaccaaagaaaaagaaaaaaaagtgggcttgtataccatctacgtcaatcctgccaacactcaccagttcgccgtcgggggaagggaccaattcgtacgcatctatgatcagcgcaagatcgatgaaaacgaaaataatggcgttttaaagaagttttgcccacatcatctggtgaatagcgaatctaaagctaacataacatgcctggtgtattcgcacgacggaaccgagctgctcgcatcctataacgatgaggatatatacttgttcaattcctcccactctgacggggctcagtacgtgaagcgctacaagggccacagaaacaatgccacagtgaaaggggtaaatttttacggccctaaatcagaattcgtcgtcagtggcagcgactgcggacacattttcttatgggagaagtcttcttgccaaatcatccagttcatggagggcgacaaggggggtgtggtgaattgcctagagcctcaccctcacctgccagtgctcgctacgagcggcctcgaccacgatgtgaagatttgggcccctacagccgaagcatctacagaattaacagggcttaaggacgtgattaagaagaacaagcgcgaaagggatgaagattccctccaccagaccgatctgttcgactctcacatgctgtggttcctcatgcaccacctccgacaaaggcgacatcatcgaaggtggcgtgaacccggagtgggcgcaaccgacgccgactcggatgaatctccttccagtagcgacacctccgacgaggaagaaggcccagaccgtgtgcagtgcatgcccagctag

SEQ ID NO: 31679 - DNA, 1056 bp, synthetic construct
  source 1..1056: mol_type = other DNA; note = Synthetic coding sequence
atgatcgtgcaacgagttgttctgaatagccggccaggtaaaaatggaaatcctgtagcggaaaattttcggatggaggaagtctacctgcctgataacatcaatgaggggcaagtgcaggtgcgaacactgtacctgtctgttgatccttacatgcggtgtcgaatgaacgaggataccggaactgactacattactccctggcaactgtcccaggtcgtcgatgggggaggtatagggatcatcgaggagtcaaagcataccaacctcaccaaaggtgactttgtcactagtttttattggccctggcagactaaggtgatcctcgacggaaattccctcgaaaaggtggatccccagctcgtggatggacatctgtcttattttttaggggctatcggaatgccgggacttacgtctctgattgggatccaggagaagggccatatcacagctggatcgaataagactatggtggtcagtggcgctgccggagcatgcggtagcgtagcaggccaaattgggcactttctgggctgttcccgtgtggtcgggatctgcggaactcatgagaaatgtatccttttaacttccgagcttggattcgacgcagccattaattataaaaaagacaacgtggccgagcagctcagagaatcctgtcctgccggagtggatgtgtattttgacaacgtggggggtaatatttccgacactgtcatatcacagatgaacgagaacagccacattattttatgcggccaaattagtcagtataacaaggatgtgccttatccacccccactcagtccggcaatagaagccattcagaaggagagaaacattactagagaacgctttctcgtgctgaattataaagacaagttcgaacctggaatattgcagctctctcaatggttcaaagaaggaaagctaaaaataaaggaaacagtcattaatggacttgagaacatgggagcagcctttcagtccatgatgactgggggaaatataggtaagcaaatcgtgtgtatcagcgaggagatcagcctatag

SEQ ID NO: 31680 - DNA, 588 bp, synthetic construct
  source 1..588: mol_type = other DNA; note = Synthetic coding sequence
atgccactcccgtttggccttaagttaaaaaggacaagacggtacaccgtatctagcaagagctgcctcgtggctaggattcaactcttgaataacgagttcgtagaattcactctgagcgtggagagcaccgggcaggagtcactcgaagctgtggcccaacgcctggagttacgagaagtaacttatttttccttgtggtattacaataaacagaatcagcggcgatgggtagacttggagaagccactgaagaagcaactggataagtacgccttggaacctacagtttacttcggcgtcgttttttacgtgccaagcgtgtcccagctgcaacaggaaatcactcggtaccagtattacctgcagttaaagaaagacattcttgagggctcgatcccttgtaccctggagcaggctatccagctggccggactggccgtgcaggcagactttggcgatttcgaccagtacgaaagccaggatttcttacagaaattcgccctcttcccagtgggatggcttcaggatgagaaggtcctcgaggaggccacccaaaaggttgccctattgcatcaaaagtattag

SEQ ID NO: 31681 - DNA, 354 bp, synthetic construct
  source 1..354: mol_type = other DNA; note = Synthetic coding sequence
atgggggataaaaagtctcccacccggcctaagaggcagcctaagccctccagcgacgagggatattgggactgtagcgtttgtacgttccgcaactctgcagaagccttcaagtgtatgatgtgtgacgtgcggaaagggacctctacccgcgacagcaaagaaggcggtaagctcgtaagttatagcacagcctcactgggcgtaaggggaaccttacggaatcgggtgggagggggaagctcagaggagaaaaagcaggctgaatacctggctcctggcagaagacgaaacatcgtccatcgaggggtagggccagggcagcgttcaggcccttcgctgaaggaggcatag

SEQ ID NO: 31682 - DNA, 3285 bp, synthetic construct
  source 1..3285: mol_type = other DNA; note = Synthetic coding sequence
atggcagagagttcctccgagagcgatcactttcgctgccgggataggctgtccccttgggccgctagaagcactcataggggaacccgctccctcccaactgtagaggtgacagaaaaagttaacacaatcacctcaacactgcaggatacatccaggaatctgcgccaggtggatcaaatgctgggcaggtacagagagtactccaatggacaggccggagctatcgagcatttaaaggaaagcttggaacagtcaatagaccagctgcggtcccagagactgctgcgcaactctggcggtagatcgatctctgtgacctcgctgtctgcatccgacctggacggcggaactggaagtgaattacatcacttccctcccacatcaccactgaaggactacggagacccacaggggatcaaacgaatgcgctcccgaacaggcgtgcgcttcgtccaggagactgacgatatgactcagctgcacggattccatcagagccttagggacctttcatctgaacaaatccggctgggagacgactttaatagagaactgtcacgccgtagccggagcgacgcagagactaagcgagctctggaagagttgacagaaaaactcaacgaggcccagaagcaggaggtcgtgtccgatcgggttgaacgccgactgcaggaactggagcgggagatgagaaccgaacgcgagctggtggagcggaggcaggatcaactggggctgatgtcactgcaactgcaggaggccttaaagaaacaagaggccaaggcggacgaacacgagggggcaatcaaaaacaaactgcggcagaccgagacagaaaagaaccagctggagcaagagcttgagcttagcaggcggttattgaatcagtctgaaggcagcagagaaacactgctccaccaggtagaagaactgcgaacacaacttaccaaagctgagggcgatcgtaaaggactgcaacaccaagtatcccagataagcaaacagcagtctaactaccaggacgagcagggggaggattggaggttccgaaggggcgttgagagggagaagcaggaccttgagaaacagatgtccgatctccgcgtccagctcaatttctcagctatggccagcgaactggaggaggtgaagcgttgcatggagcgaaaggacaaagaaaaggcccatcttgcctctcaagtggagaatttgaccagggaattagagaatggagaaaagcagcaactgcaaatgctggacaggctcaaggagattcagaaccactttgatacgtgcgaggctgagaggaagcacgccgatctgcagatatccgagctgactcggcacgccgaggacgctactaagcaggctgaaagatacttgtccgagcttcagcaatcagaagcgctgaaggaggaggccgagaaaaggagggaagacctcaagctgaaagcccaggaaagtatacgccaatggaagctcaagcataaaaagctcgagagggccttggaaaaacagtcggaaaccgttgacgaactgactggaaaaaacaaccagattttgaaggaaaaagatgagcttaagacccagctctacgccgctctacaacaaattgagaaccttcgaaaggaactgaatgacgtcttaaccaagcgggctctgcaagaggaggaacttcattcaaaggaggagaagctgcgagacatcaagagccaccaggcagatctagaattggaagttaagaactctctggatacaattcaccgcttagagagtgaacttaagaaacagagcaagatccagtcccagatgaaagtcgaaaaggctcatctcgaagaggagatcgctgaactgaaaaagagtcaagcccaggataaagccaaactgcttgaaatgcaggaaagtatcaaagacctctctgcaataagggccgatttagctaataaactggccgaagaagagagagcaaagaaggccgtcctcaaagacctgtcggatttgacggcacaggccaagagtagggatgaagaaaccgctactatcatcacccagctcaaactggagcgcgacgtgcatcagagagaactgaaagatctgacttcaagcctgcaaagcgtgaagaccaaacatgagcagaacatccaagaactgatgaaacattttaaaaaagaaaaatcagaggccgagaatcacattcgaacacttaaggcagagtcgttagaggaaaagaacatggccaaaattcatagaggacagctagaaaaactaaaatcccagtgcgatcgtttaacagaagagctaacccagaacgagaacgagaataagaagcttaagctgaaataccaatgcttgaaagaccaattggaggaacgggagaagcatatttctatagaagaggagcacctccgaagaatggaggaggcacggctacagcttaaggaccagttgttgtgcctggaaacggagcaggagagcatcctcggagtaatcggtaaagagatcgatgccgcttgtaagacttttagcaaagattctgtcgagaagctgaaagtattttcttccggacccgacatccactacgacccacatcgctggcttgccgaaagcaagaccaagctgcaatggctttgtgaagaactgaaggaacgcgagaacagagagaaaaatctgcggcatcagctcatgctgtgcagacaacagttgaggaacctcactgaaaataaggagtcagagctccagtgtttgtttcagcaaatcgaaagacaagagcagctcctcgacgaaatccacagagagaaaagagacctgcttgaagagactcagcgcaaagacgaggagatgggctccctgcaggatcgagtgatcgcattggaaaccagtacacaggttgccctcgatcatcttgagtccgtacctgagaagctgtctttgctggaagattttaaagatttccgagattcttgcagctcatcggaacgaaccgacgggaggtattccaagtatagagtacgaagaaactccctccagcaccaccaggacgacaccaagtaccgcacaaaaagttttaagggcgataggacgtttctggaaggtagtcatacaagaggattggaccacagcagctcctggcaagaccattctcgattcctatcctcccccagattcagctatgtgaattctttcacaaagaggacagtcgctccagatagcgcgtctaataaggaggacgccaccatgaacggtactagcagtcagcccaagaaagaggaatacggaagctag

SEQ ID NO: 31683 - DNA, 1353 bp, synthetic construct
  source 1..1353: mol_type = other DNA; note = Synthetic coding sequence
atgagagagatcgtgcacatccaggctggccaatgtggtaatcaaattggtgcaaagttctgggaggtcatatccgacgaacacgggattgacccttccggcaattatgtgggagatagtgaccttcaactggagcgcataagcgtatattacaatgaggcgtccagtcacaaatacgtcccccgagcaatcctggtggacctagaacccggtactatggatagcgtaaggtcaggagcatttggacatttatttaggcccgacaactttattttcggccagtccggtgccggaaacaattgggctaaaggacattatacagagggagcggagctggttgattcagtgttggacgtagttcggaaagagtgcgagaattgcgactgtttacagggattccagctgactcactctctgggagggggtacaggctccggaatgggcactctcctaattagcaaagtacgggaggagtaccccgaccgcattatgaacaccttctcagtggtgccctcacccaaggtgtctgatacggtcgtggagccatacaacgcaacgctcagcatccaccagctggtcgagaacacagatgagacgtactgtatcgataacgaagccctctacgatatttgttttcggacactcaagctggccactccaacctacggcgatttgaaccacttagtctcagcgactatgtcaggcgtgacgacatcgcttcgctttccaggacagctgaatgcagatctcaggaagcttgctgtgaatatggtcccattccctagattgcatttttttatgcctgggtttgcccctctgaccgcgcgaggatcacaacaatatagggctctgaccgttccagaactgacccagcagatgtttgacgccaaaaatatgatggcagcttgtgaccccaggcatggacggtacctgactgtggcaacagttttccgaggtcggatgagtatgaaggaggttgatgagcagatgctggctattcagtctaagaatagctcatatttcgtcgaatggattcccaacaatgtcaaggtggctgtatgcgatattcccccacgtggattgaaaatgagttccaccttcattggtaactctaccgcaatccaagagttgttcaagcgcatcagtgagcagttcacggccatgtttcggcgaaaggcattcctgcactggtatacaggagaaggcatggacgaaatggagttcaccgaggccgagagtaatatgaacgacctggtgagcgagtatcagcaataccaggacgcaactgctgaagaggagggtgaaatgtatgaggacgatgaggaagaatccgaagcacagggacccaagtag

SEQ ID NO: 31684 - DNA, 240 bp, synthetic construct
  source 1..240: mol_type = other DNA; note = Synthetic coding sequence
atgaatgagtcaaagcccggagactctcagaatcttgcatgtgtgttttgccgcaaacacgatgattgcccaaacaagtatggcgagaagaagaccaaggaaaagtggaaccttacagtgcattattattgtttactgatgtccagtggcatttggcagcggggtaaagaggaggaaggtgtctatggcttcttgatcgaggacattagaaaagaagttaacagggcttccaaattgtag

SEQ ID NO: 31685 - DNA, 1785 bp, synthetic construct
  source 1..1785: mol_type = other DNA; note = Synthetic coding sequence
atgaccgacacgagacgcagggttaaggtgtacaccttaaacgaggacagacagtgggacgatcgcggaacgggacacgtgagctctgggtatgttgaaaggctgaagggtatgtctcttctcgtccgggctgaaagcgacggcagccttctcctggaatcaaaaatcaacccaaacacggcctatcagaaacaacaagaagatgagaagttccttaccgacctcttcgcacagctgacggatgaagccactgacgaggagaaacgacaagagctcgtgaacttcctgaaagaattttgcgccttttcacaaacgctgcagccacaaaatcgggacgccttcttcaagaccttgagcaacatgggcatccttccagcccttgaggtaatcctcgggatggatgatacccaagttaggtcagctgcaacagatattttctcctacctggttgagtacaatccttccatggttcgggagttcgtaatgcaggaggcacagcagaacgatgacgtcagtaagaagctgactgaacagaagattacctccaaagacatactgctgatcaatctcatcattgagcacatgatctgtgatacagaccctgagctgggcggtgccgtccaattgatgggactgctgcggactctggttgatccggagaatatgctcgccaccgcgaacaagacggaaaaaacagagtttctgggatttttttacaaacactgcatgcacgtgctaacagcgccattactagcaaacacaactgaggataagccttcgaaagatgactttcaaaccgctcaactgctggcactggtgttagagttactaactttttgcgtcgagcaccacacataccatattaaaaattacatcatcaacaaagatatcttgagaagagtgctcgtcttgatggcatctaaacatgctttcttggccctgtgcgctctgagatttaagaggaagatcatcggcctgaaggacgaattctacaatcgttatatcatgaagtccttcctcttcgagcctgtcgtcaaggcatttctcaacaatggttctcgttacaacctcatgaattccgccatcatagagatgttcgagttcatccgggtggaagatatcaagtccttaaccgctcacgtcatcgagaattactggaaggctctggaagatgtggactatgtgcagacctttaaagggctgaagctgcgtttcgaacagcagcgcgaaagacaagataaccccaagctggatagtatgaggtccatcttacgcaaccatcgctatcgcagggacgcaaggaccctggaggacgaggaggagatgtggttcaacacggacgaagacgatatggaggacggcgaagcggttgtgtccccctccgacaagacaaagaacgatgatgatatcatggatcccatctccaagtttatggagaggaagaagctgaaagaaagtgaggaaaaagaggtattactgaagacaaatttgtctggcagacagagtcccagtttcaaactgagtctcagcagtgggacaaaaactaatctgacttcccagagttcaacaacgaacttgcccggaagccccggaagccccggttcccccggttcacctgggtcaccaggttcagtaccaaaaaatacctcacaaaccgccgctattacaacaaagggtggcctcgtgggtctggtggattacccagacgatgacgaggatgacgacgaggacgaggataaggaagataccctgcccctgagcaaaaaagcaaagttcgacagttag

SEQ ID NO: 31686 - DNA, 540 bp, synthetic construct
  source 1..540: mol_type = other DNA; note = Synthetic coding sequence
atggcagagtcaagcagtgaaagcgatcactttcgatgcagggataggctgagcccatgggcggcaagatccactcaccgcggaacacgttccctccctacagtggaagttactgaaaaagttaatacaatcacgtccaccttgcaggacacctcccgaaacctgaggcaggtggatcagatgctggggagatacagggagtacagtaacgggcaggcaggcgcaatcgaacacttaaaggagtccttggaacagagcatcgaccagctgagatcccaacggctcctccggaacagtgggggacgcagtatctcagtcacctccctctctgcgagtgacctcgatggaggaaccgggtccgagcttcatcactttccacccacctctcctcttaaggactacggtgatccacaggggattaagagaatgcggtctagaaccggcgttcggtttgtccaggagacggacgacatgacccaactgcatggctttcatcaaagcttgagagatctctcaagtgagcagattcgcctgggatag

SEQ ID NO: 31687 - DNA, 1056 bp, synthetic construct
  source 1..1056: mol_type = other DNA; note = Synthetic coding sequence
atgatagttcaacgcgtggtacttaacagtcggcctggcaagaatggcaaccccgtggccgaaaacttcagaatggaggaggtgtatttgcctgataacattaacgagggacaggttcaggtgcgtaccctttatctttctgtggacccatacatgagatgtaggatgaatgaagacacagggactgactacatcaccccctggcagctttctcaggtggtcgacggtgggggtatcggcattattgaggagtcgaaacacaccaacctgaccaagggggacttcgtgactagcttttactggccttggcaaacaaaggtcatcttagacggcaatagtctagaaaaagttgacccccagcttgttgatggtcacctgagttattttctaggggcaataggtatgccaggattgacgagcctcataggcatccaggagaagggacatatcacagccggaagcaataagacaatggtagtctcaggagcagcgggtgcctgcggcagcgtagctggtcagatcggtcacttcttagggtgtagtagagtcgttggcatttgtgggacacacgagaaatgcatcctgcttactagcgaacttggctttgacgcagccatcaattacaagaaggataacgtggccgagcaattgcgggagagctgccccgcaggggtggacgtgtacttcgataacgtgggcggtaacataagcgatactgttatttcccagatgaatgaaaatagccacattattctctgcggccagatctctcagtacaataaggacgtgccctaccccccaccactgtctccagcaattgaggccattcaaaaagagcgaaacatcacacgcgagcggttcctggtccttaactacaaggataagttcgagccaggaatcctgcagctctcacagtggttcaaagagggaaagctgaagataaaagaaacagtcattaacggactcgagaacatgggtgctgccttccaaagcatgatgacaggcggaaacatcggtaaacagatcgtctgtatttcagaggaaatcagtctttag

SEQ ID NO: 31688 - DNA, 330 bp, synthetic construct
  source 1..330: mol_type = other DNA; note = Synthetic coding sequence
atggagacggactgtaaccccatggagttatccagtatgtcaggattcgaggaagggagcgagctgaacgggttcgaaggcacagacatgaaagacatgaggctagaggctgaagctgttgtaaatgatgtcctgtttgctgtaaataacatgttcgtgtccaagagccttaggtgcgccgatgacgtggcctatattaacgtggagacaaaggagcggaatcgctactgcctcgagctgactgaggctggactgaaagtggtgggttatgcttttgatcaggtggacgaccatctccagactccttaccacgaaacagtgtattcttag

SEQ ID NO: 31689 - DNA, 387 bp, synthetic construct
  source 1..387: mol_type = other DNA; note = Synthetic coding sequence
atggcagaatccagctccgaatccgaccactttcggtgcagggatcggctctccccttgggcagcccgatcaacgcataggggcaccaggagtctccccactgtagaggtaacggaaaaggttaataccattacgagcactttacaagacacatcccgcaaccttcgccaagtcgatcagatgctcggtaggtatcgagagtacagtaatgggcaagctggcgctatcgagcacttgaaagaatctctagaacagtcgattgatcagctgcggtcacagaggcttcttcggaattccggcggacgctctatcagcgttacatcactgtccgcctccgatttggacggcggaacgggttccgaactacaccacttcccacctacctag

SEQ ID NO: 31690 - DNA, 369 bp, synthetic construct
  source 1..369: mol_type = other DNA; note = Synthetic coding sequence
atgttattcgctccctgctgtcatcagtgtggggaattcattattggcagagtgatcaaagcaatgaataattcctggcatcccgaatgttttcgatgtgatctgtgtcaggaggtgctggcggacatcggtttcgtgaaaaacgctggacggcacttatgccgaccatgtcataatcgggagaaagctcgaggtctgggcaaatacatttgtcagaaatgtcacgccattatagatgagcagcctctgatctttaagaatgacccttaccaccccgaccattttaattgtgcaaactgcggtcaggaggggtccgactgtcgctgcaccggagcagagcgcggagccatactgcccgcaatgccctag

SEQ ID NO: 31691 - DNA, 420 bp, synthetic construct
  source 1..420: mol_type = other DNA; note = Synthetic coding sequence
atggaaacagattgcaaccccatggagttaagtagtatgtcagggttcgaagaggggtcagaactgaatggattcgaggggaccgatatgaaagacatgaggctcgaagccgaggcggtagtgaacgatgtcctgttcgctgtgaacaacatgttcgttagtaagagcctgcgatgcgccgatgatgttgcttatatcaatgttgagacaaaagagcggaatcgttattgtcttgaattgaccgaagctggtttaaaggttgtggggtacgctttcgatcaggtggacgatcacctgcagactccctatcatgagacagtgtacagcctgcttgataccctttcgccggcatatcgggaggctttcggcaatgctctgcttcagaggctcgaggcactgaaaagggatgggcaaagctag

SEQ ID NO: 31692 - DNA, 4602 bp, synthetic construct
  source 1..4602: mol_type = other DNA; note = Synthetic coding sequence
atgcctgttaagcgattgcgtgaagtggtatctcagaatcacggagatcacctggttctgctcaaggatgaactgccatgtgtgcccccagccctgtccgccaacaagaggcttcccgtgggcaccggcacctccttgaacggaacatcccggggtagcagcgacctgacgagtgctaggaattgctaccagcctctcctagaaaatcccatggtcagcgaaagtgacttctctaaggacgtggctgttcaggtgcttcctcttgacaaaatagaagagaataataaacaaaaagccaatgatatattcatttcacagtacaccatgggtcagaaagatgcgcttagaacggttctaaaacagaaagcccagtcaatgcctgtgtttaaagaggttaaagtccacctgctcgaagatgcgggaattgagaaggatgcagtgacacaagagacccggatttctcccagcggcatcgatagtgctactaccgtcgccgcagctaccgccgctgccatcgctactgccgcacccctcatcaaggtgcagtccgatttagaggcgaaggtgaattctgttactgagttgctgtcaaaactgcaggaaaccgacaagcacctccagagagtgaccgaacagcagacgtctattcaaagaaaacaggaaaaactccattgtcatgaccatgagaagcagatgaatgtgttcatggaacagcatattaggcatctggaaaaactgcagcagcaacagatcgacatacagacccacttcatttccgcggctctaaaaacatcctcctttcagcccgtgagtatgccatcctcccgagccgttgaaaagtactccgtcaaacccgaacaccctaatctgggctcttgcaacccaagcctatacaatacttttgcgagtaagcaagctcctttgaaggaggtcgaagacaccagcttcgataagcagaagtcgcctttggagacccctgccccaaggcgatttgccccagtaccagtgagcagagacgacgagctctctaaaagggagaacttgctggaggagaaagaaaatatggaagtgagctgccatcggggtaatgttcgactcctggaacagattcttaacaacaacgactcactcactaggaaatcagagtcctcgaacactaccagtcttacacgctcaaaaatagggtggacccctgagaaaacaaatcgatttcctagctgtgaggagcttgaaaccacaaaagtgacaatgcagaagagtgacgacgtgcttcacgatctagggcagaaagaaaaggaaactaatagtatggtgcagccgaaggagtccctatctatgctgaagctaccagacctgccccagaacagtgtcaaattacagaccacaaacacaacgcggagcgttctaaaagacgcggaaaaaatacttagaggggtgcagaacaataaaaaggtgttagaagagaacttggaggccattatcagggcaaaagatggggctgctatgtattcattgatcaatgccttaagcacaaaccgggagatgtccgaaaaaattagaataaggaagacggtcgatgagtggattaaaacgatttctgccgagatccaagatgagttgtcacgcaccgactatgaacagaaacgatttgatcagaaaaatcaaagaactaaaaaggggcaaaatatgactaaggatatcagaacgaatactcaggacaagactgtgaataaatcagtgatcccgcgaaaacactcccagaagcagattgaagagcacttcagaaaccttccgatgcggggaatgcccgctagcagcctacagaaggagagaaaggagggacttctgaaagcaaccactgtcattcaggatgaggattacatgctgcaggtgtatgggaaacctgtgtatcaaggtcaccgtagtaccttgaagaaggggccatatctccggttcaactccccttcccctaagtccaggccacagcgcccaaaggtcattgagcgcgttaaaggcaccaaggtgaagagcatcaggacgcagactgacttctacgccacgaagcctaagaaaatggattcgaagatgaaacactcagtacccgtcctcccccacggtgaccagcagtatctgttcagcccttcccgcgagatgccaacattctctggaaccctggagggacacctgatccctatggccattttactgggtcagacacagagcaactcagacaccatgcctccagcaggagtgatagtatcaaaaccccacccggttaccgtcactacctctattcctccatcgagtagaaaggtggagactggggtgaagaagccgaatattgcaatcgtcgagatgaaaagtgagaaaaaggaccctcctcaactcacagtgcaggttctgcccagcgtagacattgatagcatctccaattccagtgctgatgtgctgtccccgctgtctagccctaaggaggcatcattgccaccagtgcagacctggatcaagacaccagaaatcatgaaggtggacgaagaggaggtcaaattccctggcactaacttcgacgaaatcatcgacgtgattcaggaggaagagaagtgcgatgagattccggattctgaacccatcttagagttcaaccgctcagtgaaagcagattcaaccaaatataacggacctccgttcccgccagtcgcctccacctttcaacccacagctgacatcttggataaagttatcgagcgtaaagagacactggaaaattctctgatccagtgggttgagcaggaaattatgtctcggatcatctcaggcctgttcccagtgcagcagcaaattgccccttcaatcagcgtgagtgtaagcgagaccagcgagccattgactagcgacatagtggagggtacctcaagtggggcactgcaactctttgttgacgcaggagtacccgtgaacagcaatgtgattaagcactttgtcaatgaagcactggctgaaaccattgctgtcatgctgggcgacagggaggctaagaaacaagggcctgtggcaacaggcgtttccggcgatgccagcacaaacgaaacataccttccagctcgcgtgtgcacacccttgcctactccccagcctacacctccttgctctccctcatcccctgcaaaagaatgtgtgctggtcaaaacccccgactcgtccccctgcgactctgaccacgacatggcctttccagtaaaggagatttgtgctgaaaaaggggacgatatgcctgccataatgttggtgaataccccgaccgtcacacccacaactaccccgccacccgcagcagccgtgtttactcctacgctctcagatatctccatcgataagctgaaggtttcgtcaccagagctccccaaaccctggggggacggagatctacccttagaggaggaaaatcctaactccccccaagaagagttgcacccacgggcaattgtgatgtctgtagccaaggacgaggaacccgaaagcatggattttccagctcagccacctccaccagaacctgtacccttcatgccctttcccgcaggtaccaaggccccatccccatcacagatgccgggatcggactcatcgacactggagtcaacactgtcagtgaccgtgacagagactgaaacactcgataagccgatcagcgagggcgaaatcctgtttagctgtgggcaaaagctcgcacccaagatattagaagacattgggttatatctgactaacctgaacgatagcctaagcagtactttgcacgacgccgttgaaatggaggatgacccccctagcgagggccaggtgatccggatgagccataagaagtttcacgcggacgctatcctcagctttgctaaacaaaaccaggagagcgcagtgagccagcaagcggtctatcattcggaggacctggaaaactccgtgggcgagctgtctgagggccagcgtcctcaattgaccgccgcagccgagaatatcctaatggggcactctctgtatatgcagcctccggtgaccaatacgcagtccctggaccagcagtgtgaccctaagccactttcccgacagttcgacaccgtctctggcagtatctacgaagattcttgcgccagccatggaccaatgtctcttggcgaactcgagttggagcccaatagcaaactcgtgctgcctactacccttcttaccgcacaggagaacgatgtcaatcttcccgttgccgctgaagactttagccaataccagcttaagcagaatcaggacgtaaaacaggtcgagcataaaccctcccaatcctatctgagagtgcggaataaaagcgatattgccccatcccagcagcaggtctccccaggagacatggatcgtactcagattgaactgaacccgtatctcacatgtgtgtttagtggcggaaaggccgtacctctatcagcctctcagatgcctccagctaagatgtccgtcatgctgcccagcgtcaacctcgaggattgcagtcagagcctttccctgtcaacgatgcaggaagatatggagtcatctggtgcggacaccttttag

SEQ ID NO: 31693 - DNA, 2334 bp, synthetic construct
  source 1..2334: mol_type = other DNA; note = Synthetic coding sequence
atgtccgcccagacctccccagcagaaaagggactgaaccccggacttatgtgtcaagaatcttacgcctgctcaggtaccgatgaagccatttttgaatgtgatgagtgttgtagcctccagtgtctgagatgtgaagaagagttacacagacaggagagattgcgtaatcatgaacgtatcaggttaaagcccggacacgtgccctattgtgacttgtgcaaagggctcagcggacacctgcccggagtgcgccagcgggcaatcgtgcgatgccagacatgtaaaatcaatttatgtctcgagtgtcaaaaaagaacccactctggcggaaacaagcgtcgacaccccgtgacagtgtataatgtgtctaacctacaggaatcactggaagccgaggaaatggatgaggagacaaagaggaaaaagatgactgaaaaggtcgtcagcttccttctggtggacgaaaacgaagagatccaggtgacgaacgaagaagattttatccgcaaactagactgtaagcccgatcagcacctcaaggtcgtatcaatttttggcaatacaggggatggaaagagccacacactgaaccacacattcttttatggaagagaagtgtttaagacctccccaacccaagaatcctgcacggtgggggtgtgggcagcttacgatcctgtgcataaggtggccgtcatcgatactgaggggctgttgggcgcaactgttaatctctcccagaggacgcgcctgctgcttaaggtactggcaatctcagatctggtcatctataggactcatgccgaccggctgcacaatgatcttttcaagtttttgggcgatgctagtgaggcctacctgaaacacttcaccaaggagcttaaagcgacaacagccagatgcgggctggacgtccccttaagtactctcgggccagctgttatcatcttccatgagacagtccacacccaacttctgggcagcgaccacccctcagaagttcccgaaaagttgatccaggatcggttcaggaagctggggcgatttccagaggcgttctcttcaattcactataagggtactaggacatacaacccacccaccgacttctccggcctccgccgtgcccttgagcagctattagaaaataataccaccaggtcgcctaggcatcccggtgtcatcttcaaggcccttaaggccttgagtgaccgtttttctggggaaattcccgacgaccaaatggcacattctagtttctttcctgacgagtacttcacatgctctagcctgtgcttgtcctgcggagtgggctgtaagaagtccatgaaccacggaaaagaaggagttcctcacgaggccaagagccggtgccggtattctcaccagtacgataaccgcgtttatacgtgtaaggcttgctacgaacgcggtgaggaagtgtccgttgtgcccaagacttccgccagtacagatagtccgtggatgggactcgcaaagtacgcctggagtggatatgtgattgaatgccccaactgtggtgttgtgtatcggagccgacaatactggtttggtaatcaggaccctgttgacacagtagtgcgcaccgagatcgtgcatgtatggccaggtacagacggtttcctcaaagataataataacgcagcccagcgtctgttggacggcatgaacttcatggcccaatcagtgagcgagctaagtctgggtcccacaaaggccgtgactagctggcttaccgatcagattgctccagcgtattggaggcctaatagccagatcctgtcatgcaataagtgtgcgacttctttcaaagacaatgatacgaaacaccattgtagagcttgtggcgaaggattctgcgacagctgctctagcaagacaagaccagtgcccgaacgcggatggggacctgcgcctgtacgagtctgcgataattgttatgaggcgagaaatgtgcagctagccgtcacagaggctcaagtggatgatgaaggcggtaccctcatagcaaggaaagttggtgaagctgttcaaaacacactgggtgcggtggtgacagccatcgatatcccattaggactcgtgaaggatgctgcgcgacctgcctattgggtgcccgaccacgaaatcctacactgtcataactgtcgtaaggaattttccatcaagctatccaagcaccactgcagagcatgtgggcagggcttttgtgacgaatgttcacacgatcgcagagcagttccatcaagagggtgggatcatccggttagggtctgctttaactgtaataaaaagcctggggacctgtag

SEQ ID NO: 31694 - DNA, 867 bp, synthetic construct
  source 1..867: mol_type = other DNA; note = Synthetic coding sequence
atggagaagttgtcggccttacaggaacagaaaggggagctgcgaaagcgcttgtcatatactacacacaagctagagaagttagagacggagtttgattcaacccgtcattacctcgaaattgaactgagaagggcccaggaagaactcgagaaagttaccgaaaaattgcggcgtattcagtctaactacatggctctccagcgcatcaatcaagaacttgaggataaactgtataggatgggacagcattacgaggaggaaaagcgggctttgtcccatgaaatagtggcccttaactctcacctgttggaggctaaggtgacaatcgacaagctgagtgaggataatgaactttaccgcaaggactgtaacttagctgctcaactgctacagtgtagtcagacttatgggagagtccataaagtgtccgagctcccaagcgacttccaggagagagtgagtcttcatatggaaaaacacggctgctccttgcccagcccactgtgtcaccccgcttacgccgactctgtccctacttgtgtcattgccaaagtcctagagaaacctgatccggcttccttatcaagcagattaagcgatgcatccgccagagacttggccttttgtgatggtgtggagaagccaggcccacggccaccgtacaaaggggacatctattgttctgatactgcactctattgcccagaggaacgacgaagagacagaaggccctctgtcgatgcccctgtgacagatgtcggttttctgcgggcacagaactctacagacagcgccgcagaagaggaagaagaagccgaggccgcagcctttccagccggattccaacatgaggctttcccctag

SEQ ID NO: 31695 - DNA, 1263 bp, synthetic construct
  source 1..1263: mol_type = other DNA; note = Synthetic coding sequence
taaacacaggcgatggcgctggagacccccactccaggacctcctagggaaggccagagccccgctagtcaggctgggacacagcacccacccgcacaggctactgcccatagccagtcctctcccgagtttaaaggttctctcgcaagcctgagtgattccctgggcgtaagtgtgatggcaacagaccaggactcgtactccacgtcctctactgaggaggaactggagcagttttcgagtccatccgttaaaaaaaaaccttctatgatcctcgggaaggccagacatcgcctatccttcgcgagcttttccagtatgtttcatgcattcctgtctaacaatcgtaagctgtacaaaaaggtggttgaacttgctcaggacaaaggatcttatttcggcagtctcgtgcaggattacaaggtgtattcattggagatgatggcacgccagacaagttctactgagatgctgcaagaaattcggacaatgatgacacagctaaagtcttacctgctccagagcacggaacttaaggcgcttgtcgaccccgctctccattccgaggaagagctggaggctatcgtggagtccgcattgtataagtgtgtgctcaagccacttaaggaggcaataaactcctgtctgcatcagattcactccaaggacggctccctgcaacagttgaaagaaaatcaattggtcatattagccaccacaacaaccgatcttggggtcaccaccagcgtccccgaagttcccatgatggagaaaatcctgcagaaattcacgtccatgcataaggcttacagtcccgagaagaaaatctctattctgctgaagacgtgtaaactaatttatgactctatggcactggggaatcccggaaaaccttacggcgcagacgattttctccccgtcctgatgtacgttttagcccgttctaaccttaccgagatgctcctgaatgtggaatacatgatggaactcatggaccccgctctgcagctgggtgaggggtcttactacctcactaccacatacggggcactcgaacacatcaagtcctatgacaagataacagtgactagacaattaagtgtggaagtgcaggactcgattcatcgctgggaacggcgacgtacattgaataaagcaagggcctccagatcatccgttcaggtgaggcccgaatccggacggggacctgtcggcccttgcccaagacatcacccctgctgccttctagctaaagaaccatag

SEQ ID NO: 31696 - DNA, 2466 bp, synthetic construct
  source 1..2466: mol_type = other DNA; note = Synthetic coding sequence
atggctggtagcgacgcagaatgggtgactattgccaataatctgctattcaagtgccatatccacctgcgcattcatgagttgcaagactgtgatgctaatgtgtttattgccctttaccagagcattctcggcgagaaggttcctgatctgatcgtgatccccagaagtcaggaggatgacgcccacaacgtccaagcggtcattgatagtttagcactggactatctccaggtaagtctgagccatattactggcgagaatattgttaagggcgataaggaatcgatcaagaatctgctcgagatctttgacggactgctagaatacctgactgagagaatatctgagacttcccacgaaaagtcagagaccgagcagtacttcaaagagtccgacaggggcgagcgactcgaggaacccgagtccaccaaagagtcaaagtcttcatggaaacgcgtatccttcggtaggtgctctctgtcctctgagatgctagggccatcatgggacggagacgaagccgaatcaactggtgagataatccggctcggcgatactgctcatactttcagcctcaggtccaacggcgctcagtgtccaaatgagatgctttcaaagaaagccctcgcaagcccctctagcaagagtcacgaggatatgctctaccctccctcggtcctgtctaagtcccggacctctttcgttgaggacacagagactctgtccgtatctggtatcccaaacgcacgcaaacttggggagccaatccgagccgctattcctcttcaccctccttaccaccctagtgaaccgagggctccgtgtccgatagggaaggagtatctgcactccagtcactgcagccctgccgttaatagcaccggggagcatacagaattcagtggggatctggacgatgggctctttctgatttcaaaactccctaagggttctaaatgggaagtgtaccccgcacaagtgcagggcccacgtacccgcaaaccgccaaaggggaaacgtaatgagaatcgggcaaccgcctcttcttgtaatagcccctttccgcagcgccctaggaagcgcctgaccgagcaagaactacacgatgtgtcagagaaactaagccagcgcctgtcagagctcgactggatgctgaaatcagctcttggcgacaggatcaaggaaaagactgaccacaaagaagagaataccggaaacgaggaagtggaggacggcaccgaagaaactctgtctcaacacagcgacggtattgtggaatacgggcctaagaaatcaagacccggactgagcatgaggcgaaagcccccttacagatcccatagcctgtcaccctctcccgttaacaagcacaaacagtttcatcttgagaggaaaagacagcggaagcccagggagaccgatgttcggcagttccaggcccaggccttcactgaagctttcgaacgcgagttgcgccgtcataaagtacaggagaatataggcccactgcgcattcatgaaaaggaagaggagactgagaagatataccggggtgaggccgttcgcaaaggaactcctgaatgttcacagccttggaagatttatagtagaaaaaccaccacccagtccttgcgcggaggactgcctaaacccaataaggcggtcccaatgaaggtctctgagcactctctgctgcccctaatgctagaacagtttcccttcctttatgtttctggaccaactctgtctaaaatgtggaagcagcaaatcgcccaggttgaacagttgaagaaggaagcctgtagagagaatcgttccaagaagaagctgcaagatgagatagaggaggctcttaggcggcatgatctcctgactacactggttaagaaagagtacgaacataacaaacgcctgcaggatttcaaagactgtattagaaggcagagactgactcaatcaaagattaaggagaatcgccagcagattgttcgcgcacgtaagtactatgacgactacagagtccaactctgcgcgaaaatgatgcgtatgagaaccagggaggaaatgattttcaaaaaattgttcgaggagggactgaatattcagaagcagcgactccgggacctcaggaactacgcaaaggagaagagggatgagcagagaagacggcaccaggacgaactcgactcgatggagaactactacaaggaccaatttagcttgctcgcagaagcgatttcgcaggaacatcaggagttaaaagccagggagaaatcccaggcacagacgctccacaaagttaaaagggagctgagaagtaagatggaaaaggaaatccagcagctgcaagacatgattactcagaacgacgacgatgtgttcttcagggagctcgaagctgaaagattcaggagcaggttgcagcttgccagcttccagtactcgaaaagtccgtccctctag

SEQ ID NO: 31697 - DNA, 4560 bp, synthetic construct
  source 1..4560: mol_type = other DNA; note = Synthetic coding sequence
atgcgaatccccgaccagaaatatgtaaccctgaaactcaacgatgtcatcaggttcggctacgattccaacatgtacgtgctggagcgtgtgcagcatcgtgttcccgaagaagctttgaagcacgagaaatacactagccagctgcaggtgagcgtaaaaggcctcgcacctaaacggtcagaggccctgcccgagcatacgccatattgtgaggcgagcaacccaagacccgaaaagggtgaccgacgcccagggacggaagccgcttcatatcggacacccctgtacgggcaaccaagttggtggggggaagatgacgggagcacactgccggacgcccaaagacagggggagccatatcccgagcgacctaagggccctgtgcagcaggacggtgaactgcatggctttagagccccagccgaaccccaagggtgctccttcagacgagagcctagctattttgagattcccaccaaggagacaccacagcccagccagccacccgaagtgccagcccatgagatgcccacgaaagacgcggaggcgggagggggaggggcagctccagtggtacaatcccacgctagctttaccatagagttcgacgattgttcccctggcaagatgaaaatcaaggatcacattactaaattttccctaagacagcggcgacctccaggaaaggaggcaactcccggagagatggtttccgctgagactaaggtggctgactggttggttcagaacgatccgtcccttctacatcgggtaggccctggtgatgaccggcactcgactaagtctgatctacccgtgcataccaggactctgaaaggacacaaacacgaagacggcacccagtcagatagcgaagatccactcgctaaggcagcatcagcagcgggagtgcccctcgaggcctccggtgaacaagttaggctgcagcgccagataaagcgagatccgcaggaactactccacaaccagcaggcctttgtgatcgaattttttgatgaagatactcctcgcaaaaagagatcacaatccttcacacattcaccgtccggagacccaaaggccgacaagcgacgaggcccaacaccagcagacagggacaggccatctgtgcccgcacccgtccaggccggaggacgctcctccggaccacaacgtgctgggtcattaaaacgggagaagaccgaagaaagattaggatccccttctcctgcttccaggacacctgcgcgaccttttggcagcgtaggaaggagaagcagactggcgcaggactttatggcccagtgtctgagagagtcgtctccagccgctagaccttccccagagaaggtgcctccagttctaccagccccattgacacctcacggtactagccccgtaggacccccaacgccaccccctgctcctactgacccccagcttaccaaggcaagaaagcaggaggaagatgactctctgtcagatgccggaacctacaccatcgagactgaagctcaagacaccgaggtggaagaagccaggaaaatgatagatcaggtttttggcgtccttgaaagtcccgagttgagcagagctagctccgcaaccttcaggccggtcattaggggtgaccgggatgagtctgacgacggcggtgtggcccagcgaatggctctgctgcaagagttcgcttctcgcccactgggggctgcccctcaggccgagcaccaaggtctgccagtgccaggaagcccagggggacagaagtgggtatcgaggtgggccagcctggctgattcatattctgaccctggcctgacggaagatgggctgggccgtagaggaggagagccggagggttcgctgccggtgcggatgcggaggcggctaccacagctgccatctgaacgggcagacagtcctgccggtcctgagagttctcgtcggtctggtccgggtcccccagagctagatagcgagcagccatccagactgtttggacaggaggaactcgatccagacagcttgtccgatgcttcagggagtgacgggggtcggggtcctgaacctggggtggagcctcaagattcgaggaggagaagcccacaggaggggcctacctggtccaggggtcgaagaagcccacgcgcaccaggggagccaactccagcgagcttctttatcggtgaccagaacggggacgccgtgttgagtcggaaaccactagcagcgcctggggatggggagggcctggggcagacagcccaaccctctccacccgctagagatggtgtgtatgtctcagcaaacgggaggatggtcatccagctgaggcccggacgaagtcccgagccagacggccctgcccctgccttcctgagacaagaaagcttcaccaaggagcctgcaagtggacctcccgctcctggcaagcccccacacatcagtagccacccactgcttcaggacctggcggctacaagagccgctcgaatggacttccattctcaggacacccacctcatattgaaagagactgaaaccgctctagccgcacttgaggctcgactattatctaattctgtcgatgccgagtgcgagggcggatcgacgcctcgaccccctgaggacgccttaagtggggactcagacgtcgacacagccagcacagtcagccttcgcagtggcaaaagcggcccaagccctaccacgccacagccactgcgcgctcagaaggaaatgtcccccagtcccccagcagcacaggatcccggtggcacggcgctggtctctgccagagagcagtcttcagaacgccaacaccacccattaggcccaactgacatgggaagaggagagcccgtccgtcgaagcgcaattaggcgaggccacaggcctagaggctcattagactggccgtcggaggaacgcggacccgtgctggctcaccttccttcaagcgatgttatggccagcaatcacgagacccccgaagcaacaggggctgggaggctgggctctaggcggaaacctgcggcacctcccccatcccccgcagctagggaagaacagagtagatccagcgcaagcagtcaaaaggggccacaagcgctgacacggtccaattcattgtccactcctcgtcccaccagagcaagccggctccggagagctcgcctcggtgacgcttctgatacggaggctgccgacggcgagagaggaagtctgggcaaccctgaacctgtggggagacccgctgccgagcaggcgaagaagttgtcaaggttggacattctggccatgcctcggaaaagagcgggttctttcacaggaacttctgatccagaggctgcccctgccaggaccagcttttccgggaggagcgtcgaattatgctgcgcttcaagaaaaccaaccatggcagaggctcgggctgtctctcgcaaagccgctaacaccgcgacaactacagggcctaggcaaccctttagcagggcccgttccggatctgcgagatatactagtaataccagacgcagacagcaggggtctgactatactagcacatctgaagaggaatatggaagccggcacggctccccgaaacatacgcgttcccacacaagtaccgcaacccagacgcctcgcgctggatctagttccagggcacggagcagagctcccggtccccgagacaccgacgacgacgaagaagagcctgatccctatgggtttatcgtccagacagcggagattgccgagattgctcgcctttcgcaaacactggtgaaggatgtagcaatcctcgctcaggagattcacgacgtggccggagacggagataccctgggatcaagcgaaccagcacatagtgcgtcactgagtaatatgccaagtacacccgcaagcaccatcagtgcaagagaagagctcgtgcaacggatcccagaggcatctctcaactttcagaaggtgcctcccggaagccttaactccagagacttcgaccagaatatgaacgacagttgcgaagacgccctggccaacaagacccgccctcgcaaccgtgaggaggtgatctttgacaacttgatgctgaatccggtgtcccagctttcccaggccattagagagaatacagagcatctagccgagaagatgaagattttgttccaaaataccggaagggcctgggaggatctggaggcacgcattaacgcggagaatgaagtgccaatcctcaagacttcaaacaaggaaatctctagcattctgaaggagctgcgaagggtccagaagcagcttgaggtcatcaacgctatagtggacccttcaggctccttggacctactcaccggaaatcgctcactcgctagcagtgcccaaccaggcctgggcaagggacgggtcgcggcacagtctccacctagcccagcttccgccgaagccctgctacccgctctgccactgcgcaactttccgcaaagggcctcctgtgggcctccatcactgcccgatcctacattcttgccagatgcggaacggttcttaatctag

SEQ ID NO: 31698 - DNA, 378 bp, synthetic construct
  source 1..378: mol_type = other DNA; note = Synthetic coding sequence
atgccatccgagaaaactttcaaacaacgcagaacattcgagcagagggtagaggacgtgcggctgatacgcgaacaacaccctacgaaaattcctgtaattatcgaacggtacaagggcgaaaagcaactgcctgtcctcgataagacgaagttccttgtgcctgatcacgtgaatatgagcgagctgatcaagataatcaggcggaggctccagttgaatgctaatcaggccttttttcttctcgtcaacggccacagcatggtgtctgtgagtaccccaatctctgaagtctatgaatcggaaaaggatgaagatggattcttatacatggtgtgcgcctctcaggagacctttgggatgaagctgtcggtttag

SEQ ID NO: 31699 - DNA, 3525 bp, synthetic construct
  source 1..3525: mol_type = other DNA; note = Synthetic coding sequence
atgcctctgccctttggactgaagttgaaacgtaccaggcgatacacagtgagcagcaaaagctgtctggtggcacggatccagttactcaataacgaatttgttgagttcactctcagcgtggaatcaacagggcaggagtccttggaggcggtggcgcagaggttagaactgcgcgaagtgacttacttcagtttgtggtattacaacaagcagaatcaacggaggtgggtcgatctggagaagccattaaagaaacagctagacaagtatgcgctggaaccgactgtatactttggggttgtgttttatgtgccttcggtgagccagctccagcaggaaattaccagatatcagtattatttgcaactcaaaaaggatatccttgaaggaagtatcccctgcaccctggaacaagccatccaattggccggtctggctgtgcaggctgactttggggacttcgaccaatacgagagccaggacttcttacaaaaatttgcgctgtttccagtagggtggctccaagacgagaaagtcttagaagaagccacgcaaaaggttgcactacttcaccagaaatatcggggactcacggctcctgatgccgagatgctctacatgcaggaggtggagaggatggatggttacggggaagaaagttaccctgcaaaggatagccagggctccgatattagcatcggagcttgtctggaaggaatttttgtgaagcataaaaacggcagacatcccgtggtgtttcgctggcatgacatcgccaacatgtcccataataagtcctttttcgcactggagctagccaacaaggaggagacaatccagttccagacagaggacatggagacagccaaatacatctggcgattatgcgtcgctcggcacaaattttatcggctgaaccagtgtaatcttcagacgcaaaccgtcacggtgaaccctattcgaaggaggtctagtagtaggatgagcctgcccaagccccagccatacgtcatgccccctcccccacagctgcactacaatggacattacacggaaccctacgcaagcagccaggacaacctgtttgtaccaaatcagaacggatactattgtcactcccagacgtctttggatagagcccagattgacctgaacggtcggatccgcaacgggtctgtctatagcgctcacagtacgaacagtctgaacaatccacagccctatctgcagccttccccgatgtctagcaatcccagcatcacagggtcagacgtgatgaggcccgattatctcccatcccaccgccattctgccgtaataccaccatcttaccggccaactcctgactacgagacagtgatgaagcagctgaaccgcggactggtccatgccgaacgtcagagtcacagcctccgcaacctgaacatcggctcttcctacgcctatagtcgacccgcagctctcgtgtattctcagcctgagattagggagcatgcgcagttgccaagcccagccgcagctcactgtcctttcagcctctcctacagttttcattctccgtccccctatccgtaccctgccgagaggaggcccgtggtgggtgccgtgtcagtacccgagctgaccaacgctcagctacaggcgcaggactaccccagtccaaatatcatgcgtacccaggtataccgaccccctcctccttatcctcctccacggcctgccaactccacaccagacttgagccgtcacctgtacatcagcagttctaacccggatcttattacgcgcagggtgcaccatagtgtccaaacgtttcaggaagattccctccctgtagcccactccctacaggaggttagcgagcccctcacagccgcacgacacgctcagctacataaaaggaatagtatcgaggtggcgggtctgtctcatggactggaggggttgcgtctaaaagaacggacactctcagccagtgctgccgaagtggcccctcgtgccgtgtctgtgggtagccagccctcggtgtttaccgagcgtactcagagagagggcccagaagaggccgagggcctcagatatggtcataaaaaatcactaagcgacgctacaatgctaatccatagctcggaggaagaagaagacgaagactttgaagaggagagcggggctagagcacccccagccagggcaagagaaccacgccctggtctcgcccaagatcccccagggtgtcctagggtactgctggccggacctctgcacattttggaaccaaaagcgcacgtgccagatgcggaaaaacgcatgatggactcatcgcctgtgagaacaaccgccgaggcacagagaccctggcgcgatggattattgatgccttctatgagcgaatccgatctcacaacaagcgggcgataccgggcacgaagggattcattgaaaaaacggcctgtttctgatctactttccggcaagaagaacatcgtggaggggttaccccctctggggggtatgaaaaagacccgagttgatgcgaagaagatcggcccattaaagttggccgctctgaatggcctctccttgagccgcgtgccacttcccgatgaaggcaaagaagtggctaccagagctacaaatgacgaaaggtgtaagatattggaacagcgtcttgaacagggtatggtcttcacagagtacgagcggatcctgaagaaacggttagtcgacggcgaatgcagtacagctcggctgcctgaaaacgccgagcggaatagattccaggatgtactaccatacgacgatgtacgcgtggagctggtcccaactaaagagaacaatacgggctatataaatgcctcacatatcaaggtatctgtgtccggcatagagtgggactacatcgcaacgcagggcccactccagaacacttgccaggacttttggcaaatggtatgggaacagggaattgcaataattgcaatggtcactgccgaggaggaagggggacgagagaaatcctttcggtattggccccgactgggaagcagacataataccgtgacatacggcagatttaaaatcacaacacgatttagaaccgacagtgggtgctacgcaaccaccggccttaagatgaaacatctcttgactggccaggagcggacggtatggcaccttcagtacactgactggcctgagcacggatgcccagaggacttgaagggatttctgtcatatctggaggaaatccagagcgttaggcgccatactaactccaccagtgatcctcaatcccctaacccgccactgttggttcactgttcagcgggagtaggtaggactggcgtcgttatcctgtctgaaattatgattgcctgcctggaacacaacgaggtcttggatatcccgagagtgctggatatgctcagacagcaacgcatgatgttggtccagaccctgtgtcagtacacgttcgtgtatagagtgcttattcagttcctgaaatcttctcgcctgatttag

SEQ ID NO: 31700 - DNA, 1245 bp, synthetic construct
  source 1..1245: mol_type = other DNA; note = Synthetic coding sequence
atgcagacattcctgaagggaaaacgcgtgggatactggctgtctgaaaagaagatcaaaaaattgaatttccaggcgttcgccgaactgtgccggaaaagaggaatggaggtggtgcagttgaatctatccagaccaattgaggagcagggacccctcgacgtgattatccacaagctcaccgacgttattctcgaagccgaccagaacgatagccagtccctagaactggtccatcgcttccaagagtatattgatgcacatcctgaaaccatagtactggacccgctcccagcaatccggacattgttggacaggtcaaaaagttacgaactaattcgtaagattgaggcctacatggaggacgatcggatttgtagtcccccattcatggaacttacttcactctgcggcgatgatactatgcgattgctggagaagaacggcttgactttcccattcatatgcaagacacgcgtcgctcacgggaccaatagccatgaaatggccatcgtattcaatcaagagggcctgaacgccatccagccgccttgtgttgtacagaactttatcaaccataatgcagtgctgtacaaggtatttgtcgtgggcgaaagctacaccgtggtgcaaagaccaagcctgaagaacttctcagccggaaccagcgatcgcgaatcaatcttctttaactcgcacaatgtcagcaagcctgagagcagctccgtcctgacagaactagataagattgaaggtgtgtttgagagaccaagtgatgaggtgattagggaattgagcagagcccttcgccaggccttaggagtgtccctgttcgggattgacattatcatcaacaaccagaccggtcaacacgcagtgatcgacataaacgcctttccaggctacgaaggagtcagcgagtttttcactgatctgctcaatcacattgctaccgtactgcagggccagagtactgctatggctgctacaggcgatgtagctcttctgcggcattctaaactgctggctgaacccgcagggggactcgtgggtgaacgaacatgcagtgcgtcacccggttgttgtggtagcatgatgggtcaagatgccccttggaaggccgaggccgatgcaggcggaacagccaaattgccccaccagagactcggatgcaacgcaggtgtttctccctcattccaacagcattgtgtcgcctcactcgctaccaaagcatcgtcccaatag

SEQ ID NO: 31701 - DNA, 2256 bp, synthetic construct
  source 1..2256: mol_type = other DNA; note = Synthetic coding sequence
atgtccgaggaagagctgacgaaggcgatggagggcctggggatggatgagggtgacggagagggaaatattctacccattatgcagtccatcatgcaaaatctgctttcaaaagacgttctctacccttctctcaaagagattactgaaaaatatcctgaatggctgcagagtcaccgtgaatcactgccaccagaacaatttgagaaatatcaggagcagcactcagtcatgtgcaaaatctgcgagcagttcgaggctgagacaccaaccgacagcgagaccactcagaaggcccgattcgagatggtcctcgacctcatgcaacagctgcaagatctgggacatccgcctaaggagctagcaggggagatgcttacttggctctttttctgtggatcccagtgggtctacggaccctggctgacctatgttggctggctgcaacagacctctttcaagatgtcttccaaggggtcaagtaccgatggtagaaccgacctggccaatggaagtctgtctagctcacccgaagaaatgtccggggctgaagaaggtcgggagacgtcctctggaatcgaagtggaagcctcagatctttctctttcattgacaggcgacgatgggggacctaaccgcaccagcacggaaagcagaggcactgacaccgagagtagtggggaggacaaggattcagatagcatggaagataccggccactatagcattaacgatgagaatcgggtccatgaccgttcagaagaggaagaagaggaggaagaagaggaggaggaggagcagccacggagaagagttcagcgtaaacgggctaacagagaccaggattcctcagacgatgaacgcgcattagaagactgggtgagctctgaaaccagtgccctgccacggcctcggtggcaagccctgcctgctctgagggagcgggaactcgggtcatccgctcgattcgtgtatgaggcatgcggcgctcgggtgtttgtgcaacgcttccgcttgcagcacggcctggaaggacataccggttgtgtgaacactcttcatttcaatcagcgtggcacttggctcgccagcgggtctgatgacttgaaagtggttgtatgggactgggtcaggaggcagcctgtgctggattttgagagcggacacaaatccaatgtcttccaggccaagtttctgcccaattccggcgattcaacccttgcaatgtgcgcgagagatggccaggtaagagtggctgaactctctgcaacccagtgttgcaagaacactaagagagttgcacagcataaaggggcttctcacaagcttgccctcgaaccggattcaccgtgtacatttctctcagccggtgaggacgcagtcgttttcacaatcgatttgagacaggatcgccctgctagtaagctcgtagtgacgaaagagaaggagaagaaggtcgggttatacaccatctacgttaaccctgcaaatactcatcagtttgcagtgggcggaagggatcagtttgttcggatctatgatcagcgcaaaatcgatgagaacgaaaataacggggtgctaaaaaaattttgcccacatcatctggtgaacagcgagtctaaggccaatatcacctgcctggtgtactcccacgacggaactgagctcctggcgtcgtataatgacgaagacatctacttatttaatagctctcacagtgatggggctcaatacgtgaagaggtacaaaggacaccggaataatgctaccgttaagggggtcaatttttatggccctaagtccgaatttgtagtgagcggctccgactgcggccacatctttttgtgggagaagagttcttgtcaaattatccagtttatggagggagataaaggtggggtcgttaattgtcttgaaccgcatccacacctcccggtgcttgcaacaagcggtctggaccacgacgttaagatttgggcgcctacggccgaggccagtactgagctcactggactgaaggatgtaataaaaaaaaataaaagggagcgtgacgaagacagcctgcatcagaccgacctgttcgacagtcacatgctgtggttcttgatgcaccacttacgacagcggcgacaccatcgaaggtggcgtgaacctggagtgggcgcaacggacgccgacagcgatgagtctccttcctctagtgatacctccgacgaagaagagggtccggatcgcgtgcaatgtatgcccagttag

SEQ ID NO: 31702 - DNA, 1056 bp, synthetic construct
  source 1..1056: mol_type = other DNA; note = Synthetic coding sequence
atgactctaaggctgctggaggactggtgtaggggcatggatatgaacccacgcaaggccctgctaattgctggcatcagccagtcatgcagcgtggcagaaattgaggaggcccttcaggcaggtctggcacctctgggggaatacagactgctggggcgaatgttcaggagagacgagaaccggaaggtggcccttgtcggtctgaccgctgagacaagtcacgccctggtccccaaggaaatccccggaaaagggggtatctggcgcgtcatttttaagccgccagatccagacaatacgtttctaagtagattgaatgagtttctggccggtgaagggatgacagtcggggagctgagtagagcgttaggccacgaaaacggaagcctcgatcctgaacaaggaatgattcctgagatgtgggccccaatgttggctcaggctctcgaggctctgcagcctgcgttacaatgtttaaagtacaagaaactcagggtgttcagcggaagggaatcacctgaaccaggagaggaagagtttggccgatggatgttccacacaacgcagatgatcaaggcttggcaggtgcctgatgtggaaaagaggaggcggctgctggagagcttacggggacctgcgttagacgttatcagggtgttaaaaattaataatcccctgatcacagttgatgaatgtctgcaggccctggaagaagtattcggagttacagacaatccacgcgaacttcaagtgaagtatctgaccacctaccagaaggatgaagagaaactcagcgcttacgtcctgagattagaacctctgctgcaaaagcttgtgcagaggggagccatcgaaagagatgcagtgaatcaggctaggctcgatcaagtgattgctggtgccgtccacaaaaccataagaagggagctgaacctccccgaggacgggccagctcctggcttcctgcagctgttggtgctaatcaaggattacgaagcagccgaggaggaagaggcactgcttcaggccatcctggagggcaactttacctag

SEQ ID NO: 31703 - DNA, 2394 bp, synthetic construct
  source 1..2394: mol_type = other DNA; note = Synthetic coding sequence
atggccgtgcaggggtctcagcgtcggttgctcgggtctctgaacagcacgccgacagcaatccctcagctgggactcgctgcgaaccagactggggcacgttgccttgaggtttccattagcgacggccttttcctgagcctaggactcgtgtcacttgtggaaaatgctctggtggttgccactattgctaaaaataggaatcttcattccccgatgtactgtttcatctgttgtcttgctcttagtgacctccttgttagcggcagcaacgtcctggaaactgctgtcatcctgctgctggaggcaggggctctggtggctagggcagctgtgctgcagcagttagataatgtgattgacgtcattacgtgtagttccatgttgagcagcctatgtttcctcggtgccatcgcagtcgatagatacatttctattttctacgctcttcgctaccacagtatcgtcactttgccgagagccagacgtgcagtcgccgctatctgggtggcctctgtggtgtttagtactctttttatagcctattacgaccacgttgcagtgctgctgtgcctggtggtttttttcctggccatgttagtgttgatggccgtgctctatgtgcacatgctggcaagagcatgtcaacacgcccaggggatcgccaggctccacaagcggcagcgtccagttcatcagggctttggcctgaagggggcagtgaccttaactattctgctgggaatcttcttcctttgctggggaccattttttctgcatttaacactgattgtactgtgcccagagcaccccacatgtggctgcatctttaagaactttaatctctttttagcccttataatatgcaatgccatcatcgacccccttatctacgctttccattctcaagaactgcggagaaccctaaaggaggtcctgacctgttcatgttctcaggacagagctctggtcagttgggacgtcaagtccctggggggtagcgtgtgtcaggagttgctccctcagcaaccgcaggagaaaggactctgcgaccagaaagcctcatccacggctcttcagcgattgctgcagaaggagttttgggaagtgatctcggatgagcacggcatcgacccctctgggaattatgtgggggacagcgatcttcaactggaacgcatcagtgtgtactacaatgaggctagtagtcacaaatatgtccctcgagccatcctggttgatctcgagcctggaaccatggacagcgtgcgatccggagcattcggacacctcttccgacccgataattttatcttcggccagtctggagcaggaaataactgggccaagggtcattatacggaaggcgctgagctggtcgatagtgtcctagacgtcgtgaggaaggagtgtgaaaattgtgattgcttacaaggattccagttaacccacagcctgggagggggtacaggttcaggcatgggcacattgttaatctctaaagttcgcgaggagtaccctgaccgcattatgaacaccttttcagttgtgccgagtccaaaggtatccgacacagttgttgaaccatataacgccaccttatctattcaccagctagtcgaaaacactgatgagacatactgcattgataacgaggccctctatgatatatgtttcagaactttgaaactggcgacgccaacgtacggcgatctgaatcacctcgtcagcgcaactatgtctggcgtaacgaccagcttgcgattcccgggacagctgaacgcggatctgcgtaagctggccgtcaacatggtgccattccctagacttcactttttcatgcctggctttgccccactgactgccagaggaagccaacagtaccgcgcactgactgtgcccgaattgacacagcagatgttcgatgccaaaaatatgatggccgcatgcgaccctagacatggcagatacctcacagttgccacagtattccggggtcgtatgtccatgaaggaggtagacgaacagatgttggctattcagtctaagaatagtagctacttcgtggagtggatccccaataacgtgaaggttgctgtgtgcgacatcccacctaggggactgaagatgtctagcacctttatcggtaacagcacagcgatccaggagcttttcaaacgcatctccgagcagtttaccgctatgttcaggcgcaaggctttcctccattggtatactggagaaggaatggatgagatggaattcaccgaagctgagagtaacatgaacgacttagtttcagaataccagcaataccaggatgcaacagccgaagaagaaggcgagatgtatgaggatgacgaagaggagtccgaagctcagggacccaaatag

SEQ ID NO: 31704 - DNA, 99 bp, synthetic construct
  source 1..99: mol_type = other DNA; note = Synthetic coding sequence
atggccgaaagtagtagcgaatcggatcacttcagatgccgcgatcggctgtcaccctgggcggcaaggtcgacccatagggggaccaggagtctgtag

SEQ ID NO: 31705 - DNA, 453 bp, synthetic construct
  source 1..453: mol_type = other DNA; note = Synthetic coding sequence
atgacggacacccgcaggagagtgaaagtgtataccctgaacgaggacaggcagtgggacgatcgtgggactggccacgtgagctcaggttacgtcgagcggcttaaaggaatgtccctactggtgcgggctgagtccgacggttctctcctgttggaatccaagattaatcctaacacagcctaccaaaagcagcaggacacgctcattgtctggtctgaggccgagaactacgatctggccctgagctttcaggagaaggctgggtgtgacgaaatatgggaaaaaatctgccaggtacaaggcaaagaccccagtgtggacattacacaggatctagtcgacgagagcgaagaggaaaggtttgacgatatgtcctcgcctggcctggaacttcctagctgcgaactatcccggctcgaggaaatcgcggagttagtagccagctcctag

SEQ ID NO: 31706 - DNA, 504 bp, synthetic construct
  source 1..504: mol_type = other DNA; note = Synthetic coding sequence
atggactggaaagaggtcttgcgcagaagactcgcgacgcccaatacctgcccaaacaagaaaaaaagcgaacaagagctgaaggatgaggaaatggatctgtttaccaaatattatagcgaatggaagggcggacgaaaaaacacaaatgagttctacaagaccatcccccgtttctactatcgtctgcctgccgaagacgaagtgctactccaaaaattaagagaggagagccgagccgtcttcctgcaacgcaaatctcgcgagctgctggacaatgaagaactccagaacttatggtttttgctcgacaaacatcagacgcctcccatgatcggcgaggaggctatgataaattatgaaaacttccttaaggtaggggaaaaagcgggagccaagtgcaagcagttttttactgcgaaggtgtttgcaaaacttctgcacaccgactcctacggtcggatttcaatcatgcagtttttcaattacgtgatgaggaagtag

SEQ ID NO: 31707 - DNA, 507 bp, synthetic construct
  source 1..507: mol_type = other DNA; note = Synthetic coding sequence
atgcagactttcttgaaaggcaagcgcgtcggctattggctgagcgaaaagaagatcaaaaagctgaatttccaggccttcgccgagctgtgtagaaagcgcggaatggaggtggtgcagttaaacctcagccgtcctatagaggaacaaggaccattggatgtgataattcataaacttacagacgtgatcctcgaggccgaccaaaacgactctcagtccttggaactggtacataggttccaggagtacattgatgcgcacccagagaccattgttttagaccctctgcctgccattcgtactctgctcgatcgaagtaagagctatgagctaatccgcaaaatcgaagcatacatggaagatgataggatctgcagccctcccttcatggagcttacctccctatgcggggacgatacaatgcggctcctggagaaaaatggcctcacatttccgttcatatgcaagacccgcgtggcgcatggaactaatagccatgaatag

SEQ ID NO: 31708 - DNA, 822 bp, synthetic construct
  source 1..822: mol_type = other DNA; note = Synthetic coding sequence
atgccaggacttagctgcagattctaccaacacaaatttccggaggttgaagacgtcgttatggtgaacgtacgatccatagccgaaatgggcgcatatgtgagcctcctggaatacaataatatcgaaggaatgatcctgctcagtgagctaagtcgcagacgcataagatctattaacaaacttatcagaatcggcagaaacgagtgcgtcgttgtgattagggtggataaggagaagggttatatcgatctgagcaagaggcgcgttagtcctgaagaagccataaagtgtgaggacaagttcacaaaatccaagacagtttactctatattgagacatgtggccgaggtcttagagtataccaaggacgagcaactggaaagcttgtttcagagaactgcctgggtctttgacgataagtataaacgcccaggttacggagcctacgacgcctttaagcacgccgtttcggacccatcaatcctggattcattggatctgaatgaggatgaaagggaagtgttgattaacaacatcaatagacggctcacacctcaggctgttaaaatccgagccgatattgaagttgcttgctacggctacgaaggcattgacgctgtgaaggaagctcttcgcgcaggtttgaactgttctaccgaaaacatgccaattaaaatcaacctaattgcccctcccaggtacgttatgacgaccaccacactggaacgaactgaggggctgagtgtgctctcacaggcgatggccgtgataaaggagaaaatcgaggagaaaaggggagtcttcaatgtgcagatgtag

SEQ ID NO: 31709 - DNA, 2757 bp, synthetic construct
  source 1..2757: mol_type = other DNA; note = Synthetic coding sequence
tgacggactaactcacgctttgttaaggttgtccttatgtctgccactattagttgcaaggaattcgcggattactttgctgtgcccgtacagaataaaatgaacccagcttacattttcgaggttgaaggaaaaccacatagtgtggaagagtactacctcaacgacttggagcatatacatcattcaaaacttagcccccacttactggaggaaccggtcatcaccaaggacatttatgaagttgctgtgtctctgatccaaatgttcgacgacctagatatgaaggaatccgggaacaaagcctggagcggagcgcagttcgtgcttgagagatcatcagtcctggttttcctgccaggtctgggggaaatcaactatatgcatgaactcctcacaagtttagtacacaagagactgcaagtctatcccctgcactcgtctgtggcactagaagaacagaacaatgtgttcctgtctcctgtacccggataccgcaaaattatcctgagcacgaacatcgcagagagctcagtgacggttcctgacgtgaagtacgtgatcgatttctgcttaacaaggaccctagtctgcgacgaagatactaattatcagagcctcaggttgtcttgggcgtctaagacgtcctgtaaccagcggaagggcagggctggtcgagttagccggggttattgttacaggctggtgcacaaagatttctgggacaactcgatccctgatcacgttgttccagagatgctacgctgtcctctgggaagtacgattctgaaggtgaaacttctcgatatgggtgaacctcgcgcactccttgcgaccgccctttctccgccaggactgtcagacatcgaacggactatactgctccttaaagaagtgggtgctttggctgtcagtggccagagggaagatgagaaccctcatgacggagagctgacattcctgggtagagtcctcgctcagttaccggttaaccagcagctggggaaactgatcgttcttgggcatgtgttcggatgcctcgatgagtgcctgattattgctgctgcactgtccttgaagaacttcttcgccatgccttttaggcagcacttagatggctataggaataaagtaaacttcagtggttcatccaaaagcgactgcattgctctggtggaggcctttaagacttggaaggcatgtagacagaccggcgagcttcggtacccgaaagacgagctaaactggggtagacttaattatatccagatcaagagaataagggaggtggccgagctctacgaagagctgaaaactcggatttcccagtttaacatgcatgtggactcacggcgtcccgtcatggatcaggagtatatttataagcagcggttcatattacaagtcgtcctggctggggctttttaccccaattattttacatttggacaaccagacgaagaaatggccgtcagggagctcgccggaaaggaccctaaaaccaccgtggttctcaaacatattcctccatatggattcctgtactacaagcagctgcagagcctgtttcgacagtgcggtcaggtcaagtcgatagtgtttgacggcgcaaaggcctttgtcgaattctcccgcaatcctaccgagaggtttaagacattgccagccgtctatatggccataaaaatgtcgcagctgaaggtgagtctcgaactgtcggtgcacagcgctgaagagatcgaaggcaaggtgcaggggatgaatgtttccaaactcaggaacacccgcgtcaacgtggattttcagaaacagaccgttgatcccatgcaggtgtcctttaataccagtgatcgatcacaaaccgttacagatttactgttaaccattgacgtaacggaggttgtcgaggtgggacacttttggggctataggatcgacgagaacaactccgaaatcctaaagaaactcacggccgaaattaaccagctcactcttgttccactgcccacacatccccacccagatctagtctgcttagcgccttttgccgatttcgacaaacagcgctacttcagagctcaggtactgtacgtgagtggaaattccgctgaggttttcttcgttgactacggtaataagagtcacgtggatctgcaccttttgatggaaatcccctgccagtttctggagcttcccttccaagccttggaattcaaaatatgtaaaatgcgaccaagcgccaagagtctggtctgcggcaaacactggtcagatggtgcatcacaatggtttgcttcgttggtaagcggctgcacactgctggtgaaggtcttctctgtagtccactcagtgttgcacgttgacgtctaccagtacagcggcgttcaggatgcaattaatatcagggacgtcctgatccagcagggctacgccgaactgactgaggaatcttacgaaagcaaggtgaatatcctgagagcagctataaataagttagtgtgtgacggaccgaacggttgtaaatgtctagggcctgagcgcgtcgcacagctgcaagatatcgccagacagaaactccttggcctattttgtcagagtaaaccgagagagaaaattgtcccaaaatggcatgagaaaccctacgagtggaaccaggtggatccaaaactggtaatggagcaagccgacagagagagttctcggggtaagaacaccttcctgtatcagctacataagctggtcgtacttgggacttag

SEQ ID NO: 31710 - DNA, 507 bp, synthetic construct
  source 1..507: mol_type = other DNA; note = Synthetic coding sequence
atggagaagctgtccgctctgcaggaacagaagggcgaactgaggaagcgtcttagctatacaacccacaagcttgagaagcttgaaaccgagtttgatagtactcgccactacctagagattgagttgcgcagggcacaagaggaactcgagaaagttactgagaagcttcgcaggattcagtcaaattacatggcactgcagaggattaatcaggagttggaggataagctctaccgcatgggccagcactacgaggaggagaagcgcgctctgtcacatgaaatcgtggcactgaactcccatctcctggaggccaaagtgacaattgataagctctcagaggataacgagctgtaccggaaggattgtaacctggctgcccagctgctccagtgcagccagacatatggcagggttcataaggtgagcgaactgccaagcgatttccaggagcgggtgagtctccacatggaaaagcatggctgcagcctaccatccccctag

SEQ ID NO: 31711 - DNA, 636 bp, synthetic construct
  source 1..636: mol_type = other DNA; note = Synthetic coding sequence
atggatatgggtaatcaacacccttccatctcgagattgcaagagattcagaaagaagttaaaagcgtcgaacagcaggtcattggattttcgggacttagcgacgataagaactataagaaactggaacggatactcacaaaacagttgtttgaaatagactccgtagatactgagggaaaaggggacatccagcaggctcgtaagagagcagcccaggaaactgagagactcctgaaggagttggagcaaaacgccaaccacccccacaggatagaaattcagaacatatttgaagaagctcagagtctggtccgcgagaaaattgtccctttctataacggtgggaattgtgtcaccgatgagttcgaggaaggaattcaggacattatcctgcggctgacccacgtgaaaacaggcggaaagattagcctgcgcaaagctcgataccacacactcacgaagatatgtgcagttcaggagattattgaagactgcatgaagaagcagccttctctccctctgtctgaagatgctcaccccagcgtggctaagatcaacttcgtcatgtgcgaggtaaataaagcccgtggagtgctaattgccctactgatgggcgtgaacaacaatgagtag

SEQ ID NO: 31712 - DNA, 2985 bp, synthetic construct
  source 1..2985: mol_type = other DNA; note = Synthetic coding sequence
atgagccagtggacacccgagtataacgaactgtataccctcaaagtggatatgaaatcagagatcccgtccgatgcccctaaaacgcaggaaagtctgaaaggtattctgcttcatccggagcctatcggcgctgccaagtcgttccccgcaggtgtggaaatgataaactctaaggtgggcaacgaattctcccatctctgcgatgactcccaaaaacaggagaaggagatgaacgggaatcagcaagaacaggaaaagagcctggtcgtgcggaagaagagaaaaagccagcaagcaggaccttcctacgtgcagaattgcgtgaaagagaaccagggcatccttggactgcgccaacacttgggcacaccgtccgatgaggataacgacagttctttcagcgactgcctgagcagccctagcagttcccttcactttggcgattcagataccgtcactagcgatgaagataaagaagtaagtgtgagacatagccaaaccatactgaacgctaaaagcaggtcccactccgccaggtctcataaatggccgagaaccgagaccgaaagtgtgtccggactcctgatgaagaggccatgcctccatggctcttcattgcgcagactgccttgtagaaagagattcgtaaaaaacaattccagtcagcgcactcagaaacagaaggagaggatactaatgcagcgtaagaagagagaagtgctagcgagacgcaaatacgccctccttcctagttcatcttcttcctccgagaacgacttgagttcagagtctagttcatcctctagtactgagggcgaagaagacctgttcgtgagcgcttctgagaaccaccagaacaatccagccgttccatcggggtccatagacgaagacgttgtagttatcgaggcttcttctaccccacaagtaacagcaaacgaggaaatcaatgtgacctccactgactcagaggtggagatagtgactgtcggcgagtcctaccggtcaaggtccactctgggacattcacgatcccactggtcccaaggcagtagttctcatgcgtctaggccacaagagcctcgtaaccgaagcaggatctcgaccgttatccagcctctgcgccagaatgctgccgaagttgtagatctgaccgtagacgaggatgagcccacagtcgtccctacgactagcgcaagaatggaatctcaggcaactagcgctagcattaataactcgaacccatctactagcgaacaggcctccgatacagcttctgccgtcaccagcagccaaccgagtaccgtcagcgaaacatcagctactcttacctctaactctacaactggcacgagcatcggcgatgactccagaaggaccactagttccgctgtcacagaaactggaccgccagccatgccgaggctgccctcctgttgcccgcagcactctccatgcggagggtccagtcagaaccaccacgcacttggccatccacacacgtcttgtttccaacagcatgggcatcactttcagcatcaccaccatcaccaccacaccccacatcctgctgttcctgtgagtcctagcttctcagatcctgcatgccctgtagaaaggcctcctcaggttcaggcaccatgcggagctaactcgtcgtccggcacttcttaccacgagcagcaggccttgcccgtggacctgagtaattctgggatcagaagccacggaagcggtagctttcatggcgctagtgcatttgacccttgctgccctgttagtagttcgagagcagctatttttggccaccaggcagcagcagctgcaccgtcacagccgctctcctcgatagacggctacggctctagcatggtggcacagccacaaccacagcctcctccccagccgagtctatcctcttgtcgccattacatgcccccaccctatgctagccttactcgacccctccaccatcaggcttccgcatgcccccactcgcacggaaatcccccaccacaaacacagccgcctccccaagtcgactatgtgataccccaccctgtgcatgccttccacagccagatctcttctcacgcgacatcccatcccgtagctccaccaccccctacacacctcgcttcaaccgctgctccaatcccgcagcacctgcctcccacacaccaacccatatcgcatcacattcctgccacagcccctcccgctcagcgactccacccgcacgaggtcatgcagcggatggaggttcaacgaaggaggatgatgcagcaccctacacgcgctcacgagcgcccacccccacatcctcaccggatgcatccaaactacggtcatggtcatcatatacacgtaccccagactatgtctagccaccctcgacaggcaccagagaggagcgcctgggagctggggatcgaggctggcgtgacagccgctacatacacacctggcgctctgcacccccaccttgcacattatcatgctcctcctcgcctgcaccacttacagttaggcgcactgcctctcatggtgcccgacatggccggttatccccatatcagatacatcagttcaggcctggacgggacctccttccgcggaccctttaggggcaattttgaggagctgattcatctcgaagagagacttggtaacgtgaataggggggctagtcagggaaccatcgagagatgcacctatccacataaatataagaaggtgactaccgactggttctctcagaggaagctgcactgtaaacaggatggcgaggagggcacagaagaggacacagaggagaaatgtaccatctgcctgtccatcctggaagagggtgaagacgtcaggcgattaccctgcatgcacctgtttcatcaggtgtgtgtcgatcagtggctgatcactaataaaaagtgcccaatctgtcgggttgacatcgaagcccagttgcctagcgagtcctag

SEQ ID NO: 31713 - DNA, 1158 bp, synthetic construct
  source 1..1158: mol_type = other DNA; note = Synthetic coding sequence
atggctcttccacacgattcaaatgaaacctcttatttactcccaccaaacaatgaggattgggggcgacagacaatccccgacttcgtatacggacagaaagatctcatggctgagggcattcagtggcctcggaacgctcccggaattcccgatgccctgccccagagcccattcgacgcagcgttgtgtagcgcttggaaacagcgggtggaactggggctcttcagatatcgactgagagaactgcagactcagatcctccctggggcagtgggtttcgtggcccagctgaacgtggagcgcggagttcagcgcaggcccccacagacgataaagtcggtgagacaggccttcgatcctgtccagttcaattttaacaagattcggcctggagaagtactcttccgcctgcatcgggaaccagatctaccaggaactctgcttcaggaggatattttagtcgtgatcaatgtgtcgcccctggaatggggacacgttctgctggtcccggagcctgcacgacagctgccgcaacggcttcttcccggtgccttaagggccggaatcgaggcggtactgctgtccctgcacccaggctttcgagttggatttaatagtctcggaggactggcttcggtgaaccatctgcacctgcacggatactatctcgctcatcgtctccccgtcgaacaggctccgagtgaaccactggacccaggcggacaccttcacttactccaagatctgcccgctcctggttttcttttttatacccgaggcccaggacctgatctggagtctttgattagccgtgtgtgtcgcgctacggactacctgaccgaccacgagatcgcacataatctgtttgtcactcgaggagcaccacctgggaagacttcgccaagctctgccctcaccggagtccgcgtgattctgtgggcaaggaagtcatcattcgggattaaagatggcgaggctttcaatgtggctttatgcgaattagctgggcatctgcccgtgaaaacttcacaggatttctcttccctgacggaagcggctgcagtcgcacttatccaggattgcaggttaccaccatcccaggccgaggatgtgcaggccgcacttgtggccctcatgtcccaggaggagcagtag

SEQ ID NO: 31714 - DNA, 7463 bp, synthetic construct
  source 1..7463: mol_type = other DNA; note = Synthetic coding sequence
tgagaggaagaggaggatgatgacgacgaggaagaagaagttagtgaggtggaatcattcattctcgatcaggacgacctggagaacccaatgctcgaaaccgcgtcaaagctgcttctgtctggtacagcagacggtgccgatttaagaactgtggatcctgagacacaagctcggcttgaggcgctgttagaagccgctggaattggcaagctgtcaactgcagatggcaaagccttcgctgacccagaggtgctgagacgccttacatcatctgtgtcctgtgcactcgacgaagccgctgcagcgctaacaagaatgcgcgcagaaagtaccgctaatgccggacagagcgataaccgctctctagcagaggcttgttctgagggtgacgtaaatgctgtacgcaaattgcttatagagggaaggtccgtgaatgaacacactgaagaaggagagtctctgctctgtttagcatgcagtgccggatattacgagctggcgcaagtgctgctggcaatgcatgcgaatgtggaggaccgcggtattaaaggcgatattacgcctctaatggccgcagccaacggaggccatgtcaagattgtgaagcttctgttggcccataaagccgacgttaatgcccagagttccacggggaacacagctctaacctacgcctgtgccggagggtacgtggatgttgttaaggtgcttctggagagcggagcctccattgaagaccacaacgagaacggccatactcctctcatggaggcaggcagcgcaggacacgtagaggtcgcccgactgttgttggaaaacggagcgggaatcaacacgcattcaaatgaatttaaagagagcgccctaaccctagcctgctacaaggggcatctggagatggtccggttcctccttgaagccggtgcagatcaagaacacaagacggatgaaatgcataccgccctgatggaagcctgcatggacgggcacgtggaggtcgcccgactcctgctggattcaggagctcaggtgaacatgcccgctgacagctttgagagtccgttgaccctggccgcttgcggcggacatgtggagctcgctgccctgttaattgaaagaggagccagcctggaagaagttaacgacgagggctatacccctttaatggaggctgcgagggagggccacgaggaaatggtagcactcctcctgggacaaggcgctaacatcaatgctcaaacagaggagacccaagagaccgccctgacgctggcgtgctgcggcggattcctggaagtggctgactttttgattaaggcaggcgctgatatcgaacttggatgttcaactccgctgatggaggcggctcaagaaggccacctcgaattggtaaaatatttgctggcagctggcgctaacgtgcatgctaccactgctaccggggacacagcactgacttatgcctgcgaaaatggacatactgatgtcgccgacgtgcttctgcaggctggagcagacctggaacacgagtcagaaggaggacgcacccccttaatgaaggcagctcgagctggccacgtctgcaccgttcagtttctgattagcaagggagctaacgttaataggaccacggcgaacaatgaccacacggttctttcacttgcatgtgctggaggtcatctggctgtcgtggagctgttgctggcccacggcgcagatccgacacacaggcttaaagatggatcaacaatgttgattgaggcggctaaaggtggccacacctctgttgtatgctatctgttggactacccaaataacttactttccgcccctccccctgacgttacgcaactgaccccaccaagccacgaccttaacagagctcccagagttcccgttcaggctctgcccatggtggttcccccacaggaacctgataaaccacctgcgaatgttgctacgacgctcccaatacggaataaagctgcgagcaagcaaaaatcttcttcacatttgcctgccaacagccaggacgtgcaaggttacataaccaaccaatctcctgagtcgatcgttgaggaggctcagggaaaattgacagagctggaacagcggatcaaagaagctattgagaagaacgcacagctgcagtcgctggaacttgctcatgcagatcagcttacaaaggagaaaatagaggaactgaataagaccagggaagaacaaatccaaaagaagcagaagatactggaggagctgcaaaaagtcgaacgcgaactgcaactcaagacacagcagcagctgaaaaagcagtacttagaggtaaaggctcagcgcatacagctgcaacagcagcagcagcaatcatgccagcatctgggcctgctgactcctgtgggcgtcggcgagcagctgagcgagggggactacgcccgattacaacaggtggatcctgtgttactgaaggacgaaccccaacagacagccgctcagatggggtttgctccaatccaaccactggccatgccccaggccctgcctctagcagctggacccttgccccctggctccatcgccaacctcaccgagctgcagggtgtgattgtcggccagccagtattaggccaagcccagcttgcaggcctgggtcaggggattttaaccgagacgcagcagggcctaatggtcgctagccccgctcagactctaaacgatacactggacgatatcatggcagtatcaggaagggcatcagcaatgtccaatacaccaacgcacagcatagccgcatctatctcacaaccccaaaccccgaccccatcacctataatatcccctagtgctatgctgcctatataccctgcaatcgacattgatgctcagaccgagtcaaaccacgacaccgcactcacactggcctgtgcaggcggacacgaagaacttgtccagaccctgctggagcgcggagcctccatcgaacaccgcgacaaaaagggctttacacccctgattctcgccgctacggcaggacacgtcggcgtggtggagattttgctagataacggggcagatatcgaggcacaatcagagaggaccaaagacacaccgttgtcattggcttgttcggggggaaggcaagaagtggttgaattgcttctagcgagaggcgcaaataaagaacatagaaatgtttcagattacactccattatcacttgccgcttctgggggttacgttaacatcattaagatactgcttaatgctggcgctgagattaactccagaaccggatccaaattgggcattagcccactcatgctggcagctatgaacgggcataccgctgctgtaaaattgctcctggatatggggtccgatatcaacgcccagatcgagaccaatcggaacaccgccctaacactcgcctgtttccaggggaggacggaggtggtgagcctgttattagatagaaaggctaacgtggagcaccgcgctaagactggccttacacctctaatggaggcagcgagcggcggttacgccgaggttggtagggtcttgcttgacaaaggagccgacgtgaacgctccacccgtcccctcctctcgcgacacagctttgactattgctgccgacaaaggccactataaattttgtgaacttctgatcggcaggggggcacacatagatgtgcggaataagaaaggtaatacccccctttggctggcagctaacgggggacacctcgatgtcgtccagctgttagtccaggcgggagccgatgtagatgcagctgataaccgcaagatcactcccctgatggccgcatttcgcaaggggcatgtcaaggttgtaaggtatttagttaaagaggttaaccaattcccaagtgacagtgagtgcatgcgatatatcgctactataactgacaaggagatgctcaagaagtgccacctttgtatggaaagtattgtacaggcgaaggataggcaagccgcagaagcgaacaagaatgccagcattctcctggaagagctggacctcgagaagctgcgcgaggaatcccggcgactggctctcgcagccaagcgcgaaaagcggaaggaaaaacgcaggaagaagaaggaagaacagcgcagaaagctggaggagatcgaggccaagaacaaagaaaacttcgaacttcaggccgcacaggagaaggaaaagctcaaggtggaagatgagcctgaagttctgacggaaccacctagcgccaccaccactactaccataggtatcagtgctacctggacgaccttggctggctcccacggcaagagaaacaacaccattacaacgacgtcttctaagagaaagaaccgcaagaacaagatcacacctgaaaacgtgcaaatcatctttgacgacccattacccatcagctactctcagcccgaaaaggtcaatggtgagagcaaaagcagctctacgtcagaatcaggcgactcagacaacatgcgaatctctagctgctccgatgagtcgtcaaacagcaattctagtaggaagtctgacaatcacagcccagcagttgtcaccactaccgtgtccagtaaaaaacagccttcggtcctggtcactttccccaaagaagaaagaaagtccgtgagtgggaaggcctccatcaagctgagcgagactataagtgagggcacttccaactctctatctacctgtactaaatccgggccttccccgctgtccagccctaatggaaaactcactgtggcatcccccaagcgaggccagaagcgagaagagggctggaaagaagtggtgagacggtccaaaaaagtgtcggtgcccagtaccgtaatcagtcgggtgattggaagaggcggatgtaacatcaacgccatacgggagttcacaggtgctcacattgacattgacaagcagaaggataagactggggaccgaataattacgatccgcggtggcaccgagagcacgcgccaggccacacagctgatcaacgctctgatcaaagatcctgacaaggagatagatgagctgattccaaagaataggctgaaaagtagctccgctaatagcaaaatcgggagctctgcccctacgactacagcagcgaacacatctctgatggggatcaaaatgacaactgtagccctctcgtcgacctcacaaaccgccaccgcactgacagttcccgctatatccagtgctagtacccacaaaaccattaagaaccccgttaataatgtgcgccctggctttcctgtgtcacttcctttggcttacccccctccgcagttcgcccacgcgctcctcgcagcccaaacgttccagcagatcaggcccccacgcctgccaatgacacactttgggggtacttttcctccggcacagagtacctggggaccctttcccgtgagacctcttagccctgcaagagcaacaaatagccccaagccccacatggtgcctcgacacagcaatcagaactcttcagggtcccaggtcaatagcgcaggaagcctgacctcatctcctaccactacgacatcctcttcagctagtactgtccctggcacttctaccaatggatcccctagttcccctagtgtgaggcgacagctgtttgtcacagtggtcaagacctccaacgctacaactacaacggttaccacaacagctagtaacaataacaccgcccctacaaacgcgacctaccccatgccaaccgccaaagaacattaccccgtgtcaagcccctcgtctccttcgccacccgcacaacccggtggcgtgtctcgcaattctccactcgattgcggctcagcctcccccaacaaggtggccagctcctctgaacaagaggcaggctctccacccgtggttgagacaactaatacacggccaccgaatagttcttctagctcgggcagctctagcgcacacagcaatcagcagcagccgcctgggtctgtgtctcaagaaccaaggcctccattgcagcaatcccaggtccctccgcctgaggtgcgaatgactgtgccacccctggccacctccagtgctcccgtcgctgttccatcaacagcccctgtgacgtacccaatgccccaaacacctatgggttgtccacagcccactccaaaaatggagaccccggcaattcgtccgccacctcatggtacaactgcccctcacaagaattcagcctccgtccaaaactcaagcgtggccgtgctgtcagtgaatcatatcaagcgccctcattccgtccccagctcagtccaactacctagcacactttccacccaatcggcttgccagaactccgttcacccggctaataagcctatcgccccaaacttctcggctcctctgcctttcggccctttcagtacactatttgagaatagcccgacatctgcccacgccttctggggcggatctgtagtgagctcacaatcgacgcctgaatcaatgctgtctgggaagagtagttatctgccaaactctgatcctctgcaccagtccgataccagtaaggctcctggcttccgccctcctttacagcggccagccccatctccgagcggaattgtgaatatggactctccttacgggagtgtgacaccatcctcaacacacttggggaatttcgcttccaatatcagcggcggacaaatgtatggtcctggcgcacctttggggggagcaccggctgctgccaacttcaatcggcagcacttctctcctctgtccctacttacaccatgttcaagtgccagtaatgactcaagtgcccagtctgtttcctcgggcgtgcgtgccccttcccctgcccctagctcagtgcctctagggtccgagaaaccaagcaacgtgtctcaagataggaaggtccctgtgcctatcggtacggaacgctctgcaaggatccggcaaacagggaccagtgccccaagcgtgatcggaagcaacctatcaacttcggttggtcactctgggatttggtcatttgaaggaataggcggtaaccaggacaaagtcgattggtgtaacccaggcatgggcaatcccatgattcatcggcctatgagtgatcccggtgtgttctctcagcatcaggccatggagagagactccactggcatagtcaccccttctggaaccttccatcaacatgtccccgcaggctatatggatttccctaaagtaggagggatgccattttccgtttacgggaacgccatgatcccgccagtagctccaatccccgatggcgctggaggccctatttttaatggccctcatgccgctgacccatcctggaacagcttgatcaaaatggtatcaagcagcaccgaaaataacggacctcagacggtatggactggtccatgggccccacacatgaatagtgtccacatgaaccaactgggtta

SEQ ID NO: 31715 - DNA, 33 bp, synthetic construct
  source 1..33: mol_type = other DNA; note = Synthetic coding sequence
atggccctcccccacgactcaaatgagacctag

SEQ ID NO: 31716 - DNA, 462 bp, synthetic construct
  source 1..462: mol_type = other DNA; note = Synthetic coding sequence
atggcaaccatgattcccccagtcaaactgaagtggctagagcatctcaatagctcgtggattactgaggacagtgagtccattgctaccagagaaggagtggccgtgttgtacagcaagctggtgtccaacaaggaggtagtcccactgccgcagcaggtactgtgtctgaaaggcccacaactgccagatttcgaacgagaatcacttagcagtgatgagcaggatcattacctcgacgccctcctttctagccagctggccttggctaaaatggtctgctctgactccccctttgccggtgctcttcgcaaaagactgctggtgctgcaaagggtcttctacgccctgtctaataaatatcacgataagggaaaggtcaagcagcagcagcactcacctgagtccagcagcggcagtgccgatgtgcactctgtttccgaacggccacgctcttcatag

SEQ ID NO: 31717 - DNA, 111 bp, synthetic construct
  source 1..111: mol_type = other DNA; note = Synthetic coding sequence
atgctacctcccaaacacctttccgcaacaaagcccaagaagagttgggctcccaatctttacgagctggattctgaccttactaaagagcctgacgtgatcatcggctag

SEQ ID NO: 31718 - DNA, 315 bp, synthetic construct
  source 1..315: mol_type = other DNA; note = Synthetic coding sequence
atggcgcagagtggcggagaggccaggcccggtcctaaaaccgctgtgcagatccgggtcgcgatacaggaagctgaagatgtcgacgagctggaggacgaggaggagggggcagagaccaggggtgcaggggatcctgcccgatatctgtcccccggttgggggtcagctagtgaggaagagccgtcacgcggtcacagaaccgcacagctgccatggctcgagtcgcagcaggtattttctctcaagccatttctgctgccaacagggattgaactgactccggaaaacccgtggggttcatccgtcagttag

SEQ ID NO: 31719 - DNA, 645 bp, synthetic construct
  source 1..645: mol_type = other DNA; note = Synthetic coding sequence
atggctctgccccacgattcaaatgaaactagttatttactgcctccaaacaatgaagactggggtagacagacgatccccgactttgtatacggacagaaggatcttatggccgaggggatccagtggcctcgcaatgcccctggcatccctgatgcgctgccccaatccccattcgacgcggctctttgcagcgcatggaaacagcgggtggagctgggtctgtttcgttacaggctacgggagctccagacccagatcctgcccggagctgtggggtttgtggcccagttgaacgtggagcggggagtgcagcggaggccccctcagaccattaaatcggtacgacaggcctttgacccagtgcaatttaattttaataagattcggcctggggaggtcctttttcgactgcacagagagccagatctccctggaacattgctgcaggaggacattctggtcgtcataaacgtctccccactggaatggggacacgtcctgctggttcctgaacctgctaggcagcttcctcagagactgctgcctggagcgctccgcgcagggatcgaagcagtgttgctgtccttgcatcctggcttcagggtggggttcaatagcctgggcggtctggcctccgtttag

SEQ ID NO: 31720 - DNA, 2988 bp, synthetic construct
  source 1..2988: mol_type = other DNA; note = Synthetic coding sequence
atgtcacagtggacccccgaatacaatgagctatatactctgaaagttgatatgaagtcggaaatccccagcgacgcacccaaaacccaagagagcctgaaagggatactgctacaccccgaacccattggagccgcaaaatcgtttcccgctggggttgagatgattaactccaaggtgggtaatgaatttagccatttgtgcgatgatagccaaaagcaggaaaaggaaatgaacgggaatcaacaggagcaggaaaaatccctggtggtgaggaagaagcgtaagtcacagcaggcaggtccatcatacgtgcagaactgcgttaaggagaaccagggcattctaggcctgagacaacaccttggtacccccagcgatgaggataatgatagcagcttttctgactgcctcagctcccccagctctagcctgcacttcggagatagcgacacagttacttcagacgaggataaggaagtcagcgtgagacactcgcagacaatcctgaacgctaagagtagaagccacagcgcaagatctcacaagtggcctcggacagagacagagtccgtctctggattgctgatgaaaaggccatgtctccacgggtcctctctcagaaggctgccatgtaggaaacgattcgtaaagaacaacagcagccagagaacacaaaagcagaaagagaggatcttaatgcaaaggaaaaagagggaagtactggccaggaggaagtacgccttgctcccttccagtagctctagttcagagaacgatttgtcctccgaaagctcttcttcatcctctaccgaaggagaagaagacctgttcgtaagtgcaagtgagaaccatcagaacaaccccgctgtaccgagcggtagcattgatgaagacgtagtggtcatagaggcatctagcacacctcaggtcacagccaacgaagagatcaacgtcacctccaccgactcagaagtggaaatagttacggtcggcgagtcgtaccgctctagaagcactttaggccacagtcgctcgcactggagccagggctcttcgtctcatgcgtctaggccccaagagcctaggaaccgcagccgcatctccaccgtgattcagccacttcgacagaacgccgcagaagtggtcgatctgactgtagacgaggatgaacctacagtggtgccaacaacctcagcaagaatggagtcccaagcaaccagtgcatccatcaataactccaacccatccacaagtgagcaggcctccgataccgcatccgctgtgacgtcttcccagccctctacggtctccgagacgtctgccacactgactagtaactccactacaggaacgagtatcggggatgacagtaggcggactactagctccgcagtaacagagactggccctcccgctatgcctagactgcccagctgttgtccacagcatagtccatgcggtgggtctagccagaaccaccacgccttaggccatccccacacttcttgtttccaacagcatggccatcacttccagcaccaccaccatcaccaccatactccccatcctgctgtgcccgttagcccaagtttttcagatccagcatgtccagttgagaggcctcctcaagtgcaggctccgtgcggcgcaaacagttccagcggcacatcgtatcacgagcagcaggctttgcctgtggatctcagtaacagcggtattcgcagccacggtagcgggtcctttcatggcgcatccgcattcgacccctgctgtcccgtgagctctagtagggcggctatcttcggacatcaggctgccgctgcagctccgtcccagcctctgtcatccatcgatggatacggatcttctatggtcgcccagccccagccccagcccccacctcaaccgagcctgagcagttgtcggcactacatgccgccaccctatgcttcactgacgaggccactgcatcaccaagccagcgcctgtccgcactcccacggcaacccccctccgcagacacagcctccaccccaggtggactatgtgataccgcatccagtgcatgctttccattcacagatctctagccatgcaacatcgcacccggtggccccaccaccccctacgcacctcgcctccactgcggcacccattccccaacacctaccccctacccaccagcccatcagtcatcacattcccgctaccgcccctcctgctcagaggctccacccacacgaagtgatgcagcggatggaagtgcagcgtcgaagaatgatgcagcatcctacaggcctcttcgtgttctgtgtctcgcgcagagcccatgagcgacctccaccccatccacaccgaatgcaccctaattacggacatggacaccacatccatgtcccacagacgatgtcaagtcacccaagacaggcgcctgaaaggagcgcatgggaactcggaatagaggcaggggtgaccgcggcaacatacacgccaggggcactacatccgcacctggctcactaccatgcccctccacggttgcatcacctgcagttgggcgctttgcctctgatggtgccggacatggctggttatccacacatcaggtatatatcctccggcctggatgggacaagcttccggggaccatttagaggaaatttcgaggagctcatccacttggaagaacgcctgggcaacgtgaataggggagcttcgcaggggactattgaacgctgtacttacccccacaagtataagaaaaggaagttacattgtaagcaggatggagaggagggtactgaagaagacacagaagagaagtgcacgatctgtctttcaatacttgaggagggggaggacgttagacgactcccttgcatgcaccttttccatcaggtctgcgtagaccaatggcttattaccaacaagaaatgcccgatttgtagagtcgacatcgaggctcagctacctagcgaatcctag

SEQ ID NO: 31721 - DNA, 1851 bp, synthetic construct
  source 1..1851: mol_type = other DNA; note = Synthetic coding sequence
atggcaggcggtaggggcgctcccggtcgaggccgagatgaacctccagaatcttacccacagagacaggatcacgagctgcaggctctcgaagccatctacggcgctgatttccaggacctccggccagatgcgtgtggcccagttaaagagcctcccgagattaatctggtgctgtatccacaagggctgactggagaagaagtctacgtgaaggtggacctccgggttaaatgccctcctacctatcccgacgtggtgcccgagatcgagctgaagaacgccaagggcctgagcaatgaatcggtcaaccttttgaagagtcggctcgaggagttagcgaagaagcattgtggagaggtcatgatttttgagttggcctaccatgttcagagcttcctcagtgagcataacaaaccccctcccaagagctttcatgaagagatgctggaaagacgggctcaagaggaacagcagcggttactggaagctaaacgcaaagaggaacaagagcagcgggaaattctgcatgagatccagcgtcgcaaggaggaaattaaagaggagaagaaaaggaaggaaatggccaagcaggagcgcttagaaatagcatccctttccaaccaagaccatacgagcaaaaaggaccctgggggtcaccgaaccgctgccatactccatgggggaagccctgatttcgtcggcaatggaaagcaccgagccaacagctctggtcggagcagacgagagcgacagtattccgtttgtaactctgaagattctcccggatcctgtgagattctttacttcaatatgggcagtcccgatcagttgatggtgcataaagggaagtgtatcggaagcgatgagcagttaggaaagcttgtttataacgccttggaaaccgcaacgggcggattcgtcctattgtatgagtgggttttacaatggcagaagaagatggggccttttctgacatctcaggaaaaggaaaagatcgataaatgtaagaaacagattcagggcacagaaacagagtttaactcactagtcaaactatcacatccaaatgtggtgaggtaccttgctatgaatctgaaagaacaggacgattcaatcgttgtcgacattttggtggaacacatctctggtgtgtccctcgccgctcacctgagtcatagtggcccaattcctgtccaccagctacggagatatactgcgcaacttctttcagggctcgattatctgcacagcaattctgtggtgcataaagtgctgtccgcgagcaacgtcctcgtagacgcagaaggaacggtgaagatcaccgactactcaatatcgaaacggttggcggatatctgtaaagaggacgttttcgaacagacgcgggttaggttcagtgataacgctcttccctacaaaactggcaaaaagggggacgtatggcgcctaggtcttctcctgctgagcctctctcagggacaggagtgcggtgagtacccggtaacaatcccctcagacctacccgcagacttccaggatttcctcaagaagtgtgtctgtttggacgataaagagagatggtcaccccagcagctgctgaagcatagttttattaacccccagccgaagatgcccctggtcgagcaaagcccagaggattccgaggggcaggattacgtagagactgtgatcccatctaacagactgcctagtgccgctttcttctcagaaacacagaggcagtttagtaggtactttatagagttcgaagagctgcagctcctcgggaagggagcttttggtgctgtgattaaggtgtggtatcgagttataccgtctcccctgtag

SEQ ID NO: 31722 - DNA, 396 bp, synthetic construct
  source 1..396: mol_type = other DNA; note = Synthetic coding sequence
atgtcacagtggacccctgaatacaacgagctgtatacccttaaggtcgatatgaagtctgaaattccttctgacgccccaaagacacaagaaagtctgaaaggcattctcctccatcccgagcccataggtgccgctaagtctttccctgccggagtcgagatgatcaactcaaaagttggaaatgagttttctcacctttgtgacgattcccagaagcaggaaaaggaaatgaacggcaaccagcaggagcaggagaaatccttggttgtgagaaagaagagaaaatcacaacaagcgggacccagctacgttcagaattgcgtgaaggagaaccagggcatcctaggtttgcgccagcacttagggacaccatctgacgaagataatgactag

SEQ ID NO: 31723 - DNA, 1863 bp, synthetic construct
  source 1..1863: mol_type = other DNA; note = Synthetic coding sequence
atggcgccagacagcgacccattccccgagggccctctgctgaaattgctgccactagatgccagagatcgaggcacccaaaggtgccggctcggtccagccgctttacacgcacttggggctcggttgggctctgccgtaaaaatctcactcccagacggagggtcctgcctttgcactgcttggccccgaagagacggggcagacgggttcgtgcaactggaccctctgtgcgcaagtcccggagcggctgtcggtgcctcccgtagtagacgctcgctctccttaaaccgactgctactggtaccctgcccacccctgcgaagggtggcagtgtggccagtgctccgagaaagggccggagcacccggagcccgaaataccgccgctgtgttagaagcagcccaggagctcctgcggaacagaccgatctccttgggccacgtggtagttgcaccacctggagcaccgggactggtggccgctctgcacattgttggcggtacccccagccccgatccagcaggcctggtcacaccccgaacccgcgtgtcactagggggtgagccacctagcgaagctcagccccagccagaggtacctctggggggtctgagtgaagctgcggacagtcttcgggagctgctccggttgcctttgcgctatccgcgagccttgacagcactcggactcgccgtcccaaggggcgtactgttggccggtcccccaggggtgggcaagacccagcttgtgcgggctgtcgcacgcgaggctggggctgaactccttgcggttagtgctcccgcactgcagggatcgcgtcctggcgagactgaggagaacgtgaggagagttttccaacgggctcgcgaactggcatccagaggcccatccttactgtttctggacgaaatggacgctctctgtccccaacgtggatcccgggctccggagtccagggtcgtggcacaggttctgacccttctggacggggcttccggagatagggaggtcgttgtggtgggtgctacaaaccggcctgacgccctcgaccccgctcttagaagacccggtagatttgatcgggaagtggttattggcaccccgacacttaagcaacgcaaggaaatcctccaggtgattactagcaaaatgccaatttcatctcatgttgacttgggacttctcgcagaaatgacggtgggctacgtgggggctgacctgaccgccctttgtcgcgaggccgctatgcacgccttgctgcatagcgaaaagaaccaagacaaccctgttatcgatgaaattgacttcttggaggccttcaaaaatatccagccctcttctttcaggtctgtcatcggcctgatggacataaagcccgtggactgggaggaaatcggtggactggaggacgtgaagctgaagttgaagcaatctattgagtggcctctgaagtttccctgggaattcgtgaggatgggactgacgcagccaaagggagtccttctgtacggaccacccggatgcgccaagacaactctcgtcagagcattggcaacatcatgccattgctccttcgtctccgtgtctggtgccgatctgttcagcccctttgtcggcgatagtgagaaagtactgagccagatatttaggcaagccagagccagcaccccggcaatactgttcttggacgaaattgacagtatcctgggagccaggtcagcaagcaagactggctgcgatgtccaagagcgggtcctgtccgtgctcttgaatgaacttgacggggtgggccttaaaacaatagaacggcgaggaagtaagtcgagccagcagggaaaatacaaagagctgaagaagtag

SEQ ID NO: 31724 - DNA, 4767 bp, synthetic construct
  source 1..4767: mol_type = other DNA; note = Synthetic coding sequence
atgctaccaccgaagcatttgtcagcgaccaagcccaagaagtcctgggcccctaatctgtacgagctcgattcggatttaacaaaggagccagacgtcatcattggcgaaggacccacagactccgaattttttcaccaacgattccgaaatttaatctacgtagaatttgtcgggcctcgcaagactttgataaagctccgcaacttgtgccttgattggttacagcccgaaacacgtacaaaggaggaaattattgaactcttggtcctggaacagtacctgacgataattccagagaagctcaaaccatgggtgcgggcaaagaagcccgagaattgcgaaaagctcgtcacactgctggaaaactacaaggaaatgtaccagccggaggacgataacaacagcgatgtcacgtccgacgatgacatgacaaggaaccgacgggagtcttccccgccacactcagttcacagcttctcagacagggactgggacaggcgcggtcgctcccgtgatatggagcctcgtgatcgatggtctcacacaagaaaccccagatccaggatgccccctcgcgatctgtcgctgcctgtggtagctaaaacttctttcgaaatggacagagaagacgaccgcgactccagggcatacgaatctaggtcacaagacgccgaatcatatcagaacgtcgtggacttagctgaggatcgcaagcctcataacaccattcaggacaacatggagaactatagaaagttactcagcctggtccagctggcagaggacgacggccacagtcacatgacccagggccatagttcacgctcaaagaggtcggcctatcctagcaccagcagaggccttaagaccatgcccgaggcgaaaaagtctacccatcgaagagggatctgcgaggacgaaagtagtcacggggtcattatggaaaagtttatcaaggatgtgagtcgtagttctaaatcgggtcgagccagggagtctagcgacagatcacagaggttccctagaatgagcgatgataactggaaagatattagcttaaataagcgtgagtcggtaatacaacaaagggtatatgaaggcaatgcttttagaggtggatttcgattcaactccacgttggtgagccgtaagcgggtgctcgaaagaaaaagaaggtatcactttgacacagatggaaaaggctccatccatgatcagaagggatgccctcgaaagaaaccttttgagtgtggctcagagatgcgaaaagctatgagtgtcagttccctctctagcctgagtagcccaagctttacagagtcacagcccattgacttcggggctatgccttatgtttgcgatgaatgcgggcgatccttctcggtgattagcgaatttgtcgaacaccagattatgcacacacgcgagaatctgtatgaatatggtgaaagcttcattcactctgtagccgtgtctgaggtgcagaagtcccaggtgggtggcaagcgtttcgaatgcaaggattgcggagaaacgttcaataagagcgcagcacttgctgaacatcgcaagatacatgccagaggctacctcgtagaatgtaagaatcaagagtgcgaggaggcttttatgccctcacccactttcagcgaacttcagaagatctacggaaaggacaagttctacgaatgtcgggtttgtaaggagacatttttgcactcaagcgccctaatcgagcatcagaagatccattttggagatgacaaggataacgaacgtgaacatgagagagaaagagagagagaaaggggagaaacctttcgtcccagccctgctctcaatgagttccaaaaaatgtacggtaaggagaagatgtacgagtgcaaagtttgcggggagaccttcttacattcttccagcctgaaggagcatcagaagatccacacaaggggtaatccatttgagaataagggtaaagtgtgcgaggaaacatttatccctggtcagtctttaaagaggcgccagaaaacttataataaagagaagttgtgtgactttaccgacggtagagacgctttcatgcaaagtagtgaactgtccgagcatcagaaaatccacagccgaaaaaatctgttcgaaggacgcggatacgagaaaagtgttattcactccggaccctttacagagagccaaaaaagccatacaattacacggcctctggagagcgacgaagacgaaaaagccttcactatctcatctaacccgtatgaaaaccagaagattccgaccaaggaaaacgtgtacgaggcaaagagttacgaaaggtccgtaatccacagccttgcctccgtcgaagcccagaaatcccattccgtggctggtccctctaagcccaaggtgatggccgagagcactattcagtctttcgacgccatcaatcatcagcgtgtaagagccggaggcaataccagcgagggtagagagtactcaaggtccgtaattcactcacttgttgctagcaaacctccacgctcacacaatgggaacgaactcgtggaatcaaacgaaaaaggtgagtcctcaatctacattagtgatctaaatgacaagaggcagaaaatccccgctagagaaaacccttgtgaagggggaagcaagaatcgcaactatgaggactcagtgatccagagcgtctttcgtgcaaagccacagaagtcggtacctggggaggggagtggggaatttaaaaaagatggagaattctcagtgccttcttccaacgtgagggagtaccaaaaggcacgcgcaaaaaaaaagtacattgaacatcgcagtaatgagacgtcggtgatccacagcctgccattcggcgaacagacattccgaccaaggggcatgctgtatgagtgccaggagtgtggagagtgttttgcacattcttcggatctgaccgagcatcagaagatccatgatagggagaaaccctccggtagccgcaactacgagtggagcgtaatcagatcactggctccgacagaccctcaaacatcatacgcccaggaacagtacgcaaaggagcaggctagaaataaatgtaaggacttcagacagttctttgccacatctgaggatctgaataccaatcagaagatctacgatcaggaaaaatcccacggagaagagtctcaaggggaaaatacagacggcgaggaaacccactcggaggaaactcatggccaagagaccattgaggatccagtgatccagggatctgacatggaagatccacagaaggatgaccccgacgacaagatctacgaatgcgaggactgcggactcggcttcgtggatctcaccgacctgactgaccatcaaaaggtacattcccgcaagtgcttggtggactcgcgggagtatacccactcggttatacatacacattctattagcgagtatcaaagagactataccggggagcaactgtatgagtgtccaaagtgcggagagtcctttattcacagcagttttctgtttgagcaccagcgtattcacgaacaagaccagctctattctatgaaaggatgtgatgatggattcatcgctctgctgcccatgaaacccaggaggaacagagcagccgaaagaaaccccgctctggcagggtcagccatcaggtgccttctatgtggacaagggtttatacattcaagcgccttgaatgaacacatgaggctacaccgggaagacgatcttttagaacagtctcagatggctgaagaggccattattccaggcctggccttaaccgagttccagagaagccaaactgaggagcgcctcttcgaatgcgctgtttgtggggaatccttcgtcaatcccgctgagctcgctgaccatgtgactgtgcacaagaacgagccctatgaatatggcagctcatatacacacacctcattccttactgaaccccttaagggagcaataccattttacgaatgtaaggactgtggcaagagctttattcatagtacagtgctgactaaacacaaagagctgcatcttgaggaagaggaagaggacgaggctgccgctgccgcagccgctgcagcccaggaggtggaggccaacgtacacgtcccccaggtggtgctgcggatacagggcctaaacgtggaggccgctgaaccagaggtcgaggccgctgagcccgaagtggaagccgctgagcccgaagttgaggccgctgaacctaatggcgaggccgaaggccctgacggagaagccgctgagcctattggagaagccggacagccgaacggcgaagccgagcagccaaatggcgatgcagatgaaccagacggagcaggaatcgaggacccggaggagcgggcagaggaacctgaagggaaggccgaggagccagagggagatgccgatgagcctgacggtgtgggcatcgaggacccagaggaaggcgaggaccaggagattcaggttgaggagccgtactacgattgccacgaatgcactgagacttttacctccagcaccgccttctccgagcacctgaaaacacacgctagtatgatcatcttcgagcccgctaatgctttcggagagtgcagcggctacatcgagcgagctagcacatccacaggaggcgctaaccaggccgacgagaagtacttcaaatgcgacgtttgcggccagctttttaatgaccgcctgtcactggcgaggcaccaaaatacacataccggctag

SEQ ID NO: 31725 - DNA, 63 bp, synthetic construct
  source 1..63: mol_type = other DNA; note = Synthetic coding sequence
atggctacaatgattccaccagtgaaattaaaatggctcgagcacctaaatagttcttggtag

SEQ ID NO: 31726 - DNA, 4389 bp, synthetic construct
  source 1..4389: mol_type = other DNA; note = Synthetic coding sequence
atgtaccagcccgaggacgacaacaactccgacgtcacttctgatgatgatatgacccggaatagacgcgagtcaagtccgcctcattccgtgcacagctttagtgacagagattgggataggagaggaaggagtcgcgatatggagcccagggaccggtggagccatacaagaaatccacggtcacgaatgcctcccagggacctatcactgcccgtcgttgctaagacatcttttgaaatggaccgtgaagacgaccgcgactcacgtgcctacgaatctcggtctcaggacgctgagtcctaccagaatgtcgttgaccttgccgaagacagaaaaccgcataatacgattcaagacaatatggaaaattatagaaagctcctaagtctcgtccaacttgcagaggacgacgggcacagccacatgactcaggggcactcaagccgctccaagaggagcgcatacccttccaccagccggggactgaaaacgatgccggaggccaagaagtctactcacaggcgcggaatctgtgaggatgagtccagtcacggtgtgataatggagaagttcataaaagatgtttcacgaagcagtaagtctggccgtgccagagagagtagtgataggtctcagcgctttcctagaatgagtgacgataactggaaggacattagcctgaataaacgggagagcgtcattcagcagcgtgtttacgaaggaaacgcattcagagggggatttcgattcaattcaacccttgtgagccgaaagagagtgctcgagcggaaacgaaggtaccattttgataccgatgggaagggttctatccatgaccagaagggctgcccaaggaagaaacctttcgagtgcgggagtgaaatgaggaaggctatgtccgtgtctagtttatctagtctttcttcaccatccttcaccgaatctcagcctattgacttcggcgcaatgccatatgtgtgcgatgagtgcggcaggagttttagcgtgataagtgagttcgtggaacatcagatcatgcacacaagggagaacctgtatgagtatggagaatcctttatccactccgtcgccgttagcgaagttcagaagagccaggtgggcggtaagagatttgagtgtaaagactgcggggagaccttcaataagtccgccgcactggcagagcatcggaagatacatgcaagaggatacctggtggaatgcaaaaaccaagagtgtgaagaagccttcatgccctcccccacgttctctgagctgcagaagatttacggaaaggacaaattttatgaatgccgtgtctgtaaagaaacattcctccattcctctgccttaatcgagcatcagaagatacacttcggggacgacaaggacaatgaaagggagcacgagcgggagcgagagcgggagaggggtgagaccttccggcctagtcctgcactgaacgagtttcagaagatgtacggaaaagagaagatgtacgagtgcaaagtttgcggcgagacattcctccacagctcttcccttaaggaacaccaaaaaatacacacgagggggaacccattcgagaataaggggaaagtatgcgaagagaccttcatcccgggtcagtcgttaaagagacgccaaaagacctacaataaagaaaaactgtgtgatttcacagacggacgtgatgcttttatgcagtcaagtgagttaagtgagcatcaaaagattcattcccgcaagaacctctttgaaggaaggggatatgagaagagcgtcatccacagtggaccatttaccgaaagtcagaagtcacacaccattactcggcctctggagagcgacgaagatgaaaaagcctttaccatctcatccaatccttacgaaaatcagaaaatacctactaaggagaacgtttatgaggctaagagctacgagcgctccgtcattcattcactagcctcagttgaggcgcagaaaagtcatagcgtggcaggcccttcaaaaccgaaagtcatggccgaatccacaattcaatccttcgacgccatcaaccaccagcgcgtgcgcgctggcggtaacaccagcgagggcagagaatacagcagaagcgtgattcatagcttggtagccagcaaaccccctcggtcccacaatggtaatgagctagtggagagtaacgagaaaggagaaagcagtatttacatctctgatttgaatgataagaggcagaaaatccccgcacgggagaacccatgcgagggagggagcaaaaacagaaactacgaagattcagtgatccagtcggtgttcagagccaagccccagaagtcagtacccggtgagggctctggagagtttaagaaagatggcgagttctccgtgcccagttctaacgtgagggaataccagaaagctagagccaagaagaagtatatcgagcacaggtctaacgagaccagcgtcatacacagtttgccatttggcgagcaaacattccggcctcggggaatgctatacgaatgccaggagtgtggcgagtgcttcgctcattcctccgatctgacagaacatcagaaaatccacgacagggaaaagccttccggaagcagaaactatgagtggagcgtaatcaggtctttggcgccaacagatccccagacatcttatgcacaggaacagtatgctaaggagcaagctagaaataagtgcaaggatttccgacaatttttcgctacttctgaagacctgaacaccaatcagaagatttatgatcaggaaaagagccacggcgaagagtcgcaaggggagaacacagacggcgaagagacacactcagaggaaacacatgggcaggagactattgaggacccagtgattcagggttctgacatggaggatcctcagaaagatgacccagatgacaaaatctatgaatgcgaggactgtgggctaggctttgttgacctcacagacctgaccgatcatcagaaggtgcatagccgtaagtgcctggtggactcaagggagtacactcacagtgtgattcatacacactctatttccgaataccagcgcgactacacaggcgagcagctttacgagtgcccgaaatgcggtgagtcattcatacacagcagcttcttgttcgagcaccagcgaattcatgagcaggaccagctttactctatgaaaggatgtgatgacggcttcattgccctgttaccgatgaagcctcggagaaatagagccgctgagcgcaacccggcactggccggtagcgccatcagatgccttctctgtggtcagggctttattcattcctccgcactcaatgagcatatgcgactgcatcgcgaggacgatctactcgagcagagccagatggcagaagaggctatcattcctggccttgctttgacagaattccagaggtcacagacagaggagcggttatttgaatgtgccgtgtgtggcgaatcattcgttaaccccgctgagctcgctgaccacgtaacggtgcacaagaatgagccatatgaatacgggtcttcctacacacatactagcttcttaactgaaccgctgaagggcgctattccgttctacgaatgtaaggactgcggtaaatctttcatacattctactgtcctgaccaagcacaaggagctccatcttgaagaggaggaagaagatgaggccgcagcggcagctgctgccgctgcccaggaggttgaggcaaatgtacacgttcctcaggtggtattgaggatccagggactgaatgtcgaggctgctgagcccgaggtggaggccgctgaacccgaagtggaggctgcggaacccgaggtcgaggcggcagagccgaacggcgaggccgaaggccctgatggcgaagccgcagagccgatcggagaagctggacaaccaaatggtgaagctgagcagcctaatggcgatgctgatgagcccgatggggcagggatcgaagaccccgaagaacgggcagaggaacctgagggcaaggcggaggagcctgaaggcgacgctgatgagccagatggtgtgggtattgaggatcctgaggaaggtgaggatcaggagatccaggttgaagaaccctactatgactgccatgaatgcacagaaaccttcaccagcagcactgccttcagcgaacatctcaagactcatgccagcatgatcatcttcgagcctgccaacgcgttcggtgagtgctctgggtacatagagcgagccagcacctccactggcggagccaaccaggcggacgagaagtatttcaagtgtgatgtgtgcggacagctgttcaatgaccgactgtctttggccaggcatcagaacacccacacaggttag

SEQ ID NO: 31727 - DNA, 438 bp, synthetic construct
  source 1..438: mol_type = other DNA; note = Synthetic coding sequence
atggcaactatgatccccccagtgaagctgaagtggctggagcatctgaatagttcttggatcactgaggatagcgagtcaattgcaacgcgtgagggtgtagccgttctctattctaaactggttagtaacaaagaggtcgttcctctcccacagcaggttctatgtttaaaggggccacagctacctgatttcgagcgagaaagcttatcttccgacgagcaggaccattatttggatgctctgctgtcaagtcaactggccttggctaaaatggtgtgctcggattcacccttcgccggtgcgctgcgcaagcgcttgctggtgctgcaacgagtcttctatgcactgtctaacaaatatcatgacaagggtaaagtgaaacaacagcaacacagccccgagagttcctcaggctctgctgatgtgcacagctag

SEQ ID NO: 31728 - DNA, 4284 bp, synthetic construct
  source 1..4284: mol_type = other DNA; note = Synthetic coding sequence
tgagcaaagcaagaacggctggaaatcgccagtctgtccaaccaggatcacacttctaagaaggaccccggtggccaccggacggctgcaattttacacgggggatctccagactttgttggcaatggcaaacacagagcaaactcctctggtcggagccggagagagcgacagtattcagtgtgcaattctgaggacagccccggatcttgcgagatactctattttaatatggggtcgccagatcagttaatggtccacaagggcaagtgtatcggctcagatgagcaattaggcaaattggtctacaacgcactagaaactgccacaggaggatttgttctgctctacgagtgggtgctgcagtggcagaaaaaaatggggcctttcctgacaagccaggaaaaggaaaaaatcgataagtgtaaaaaacagatacagggcaccgagactgagttcaatagtctggtaaaactgtcgcatcctaacgtagtccgttacctggccatgaacctgaaagagcaggatgactccattgtggtggatatcctggttgaacacatctctggcgttagtctagctgcccaccttagccattcaggtcctatccccgtgcaccagttaagacgctataccgctcagttattgagcggtctggactatttgcactcaaactctgtggtacacaaggtgctgtccgccagcaatgtcctagttgacgccgagggcaccgtgaaaattactgactattcgatcagtaagaggctggccgatatttgcaaagaggacgtattcgagcaaaccagggtccgatttagtgataatgctctaccctataagactggcaaaaagggtgacgtatggaggctgggattgcttcttctgagcctgtcacaaggccaggagtgcggagagtatcctgtgaccataccatctgacctcccagcggacttccaggacttcctgaaaaaatgcgtgtgtctggatgataaggagcggtggtctccacagcagctgttgaaacacagctttattaatcctcagcctaaaatgccgctagtggagcagtctcctgaagactcggaggggcaagactatgttgagaccgtcatcccgtcaaacagactcccaagcgccgctttcttcagcgagacccaacgacagttttctaggtactttattgaattcgaagaactacaactcctagggaagggcgcttttggcgcagtgatcaaagtgcagaataaacttgacgggtgttgttacgcagttaagcgaatacctatcaaccccgcttcccgccagtttcgccgaattaagggggaagtgactctcctgtctcgcctgcatcacgagaacattgttcggtactataacgcctggattgagaggcacgaaaggcccgcaggcccaggcaccccgcctccagatagtgggccactggccaaggatgaccgagctgccagaggccagcctgcttccgatacggacggcctggactctgtggaggcagctgcccctccacccatcctgagctcttctgtggaatggtcaactagcggcgaaaggtctgccagcgctcgattcccagctacggggcctgggtcaagtgatgacgaagacgacgatgaggatgaacatggaggggttttttcccaaagctttctgcccgctagcgatagtgaatccgatatcatctttgataacgaggatgaaaacagcaagtcccagaatcaaatggagtactgcgaaaagagtaccctcagggatactattgatcaaggactgtatagggacaccgtcagactgtggaggcttttccgtgagatcctggacggcctagcctatatacacgagaaaggcatgattcatcgagacctcaaaccagtcaacatttttctggactccgatgatcacgtgaagatcggagactttggattggcaacagaccacttagccttttctgccgactcgaagcaagatgatcaaaccggggacctgattaaatccgatccaagcgggcatttgaccggcatggtcggtacagccctgtacgtgagtcctgaggtccagggcagcaccaagagcgcttataaccagaaggtcgatctcttctctttgggtatcatcttcttcgaaatgagctaccaccccatggtcaccgcttccgaacggatattcgtgctgaatcagttgcgtgatcctaccagtcccaagtttcccgaggacttcgacgatggagaacatgccaaacaaaaaagtgttattagctggctgctgaatcatgacccagctaaacgcccaacagccactgaactactaaaatctgaactgctgccacctccacagatggaggagagcgagttacacgaagttctgcaccatactctgacaaatgtggacggcaaggcctacagaacaatgatggcccagatcttttctcagcgtatcagccccgctatcgactacacatatgattccgatatcctgaagggcaacttcagcattcgaactgcgaagatgcagcaacatgtgtgtgagaccatcattagaatctttaaaagacacggggctgtacagctctgtacacccctgctgctccctcgtaacaggcagatttacgaacacaacgaggcagccctcttcatggaccattctggcatgctggtgatgctcccatttgaccttcgtatccctttcgccaggtacgtcgcccgtaacaatatcctgaacctcaaacgatactgcatcgagagggtttttcggccaagaaagttggacagatttcacccaaaagagctgctggaatgcgcgtttgacatcgtaacaagcacaacaaattctttcctcccaacagccgaaattatctacaccatctacgagataatccaggagttccctgctcttcaagaacggaactatagcatttatctgaaccatacaatgctacttaaggctattttgctgcactgcgggatccctgaagataaactgagccaggtctatataatactctacgatgccgtgaccgaaaagttgacccgacgtgaggtggaggccaagttttgcaacctgtccctgagcagcaattccctatgcagattgtacaaattcattgaacaaaaaggggatttgcaggacctaatgccaactatcaacagtctcatcaagcaaaagactggcatcgctcagctggtaaaatatggcctgaaggacctggaagaagtcgtggggctgttgaaaaaactcggtatcaaattacaggtgttgatcaacctcggtttagtgtataaagtacagcaacacaacgggataattttccaatttgtggccttcatcaagaggcggcagagagccgtccccgaaatcctggcagctggaggaagatacgacctgttgattcctcagttccggggaccgcaggctctgggtcccgtgcccacggccattggcgtgagcattgcaattgataaaattagcgccgcagtgctgaatatggaggagtccgtgactattagtagctgtgacctgctcgttgtctcagtgggccagatgagcatgtccagagccattaacctgacacagaagctgtggacggcaggtataaccgcagagatcatgtacgattggagtcagtctcaggaagagctgcaggaatactgccgccaccatgaaataacttacgttgccctggtatcagacaaagagggatcccacgtgaaggttaaatcgttcgagaaagagagacagacagagaagcgcgtcctggagactgagctggtggaccatgtgctgcaaaaacttaggacaaaagtgacagacgagagaaacggaagagaagccagtgataacttagctgtgcaaaatctcaagggaagtttctccaacgcatccggcctgttcgaaatccacggggctacagtggtccctattgtgtcagttctggctccagaaaagctctcagcgagtacccgtagaaggtacgagacacaagtgcagactaggctccagactagtttggccaacctgcatcaaaaatcttctgagattgagatcctggcagtggacctgcctaaggagactattctacagtttctatccttagagtgggacgcagatgagcaagcttttaataccacagtgaagcaattactgtcgagactgccaaagcagagatatctcaaattggtttgcgatgagatctataatattaaagtggagaaaaaagtgagcgtgctattcctctacagctaccgtgatgattactacaggatcctcttttag

SEQ ID NO: 31729 - DNA, 4767 bp, synthetic construct
  source 1..4767: mol_type = other DNA; note = Synthetic coding sequence
atgctgccgcctaaacacttgtctgccactaaacctaaaaaaagttgggccccaaatctttacgaacttgacagtgatctgaccaaggaaccggatgtgatcatcggcgaaggtcccactgactccgaattctttcatcaacggtttcgaaacttgatatacgtcgaattcgtgggcccacgcaaaaccctgattaaactgcgcaatctctgtctcgactggctgcagccagagactagaaccaaagaagaaataattgaactgctggtgctggagcagtatctcaccattatacccgaaaagctgaagccctgggtcagagccaaaaagcctgagaattgtgaaaagctggttactctgctggagaattataaagaaatgtaccagcctgaagacgataataacagtgatgtgacctcggatgatgatatgacccggaatcgcagagagtcctcccctccgcactctgtgcacagttttagcgaccgggattgggatagaagaggacggtccagagatatggagccacgtgacagatggagtcacacgaggaatcccaggagcaggatgcctccccgagacctgtctctgcctgtcgtggcaaagacctcatttgagatggacagggaggatgatcgggattcgcgagcatatgagtcgagatctcaagatgctgagtcctaccaaaacgttgtcgatctggcagaggataggaaaccccacaacaccatacaggacaatatggagaactaccggaagctcttgagtctggtgcagctggcggaagacgatgggcacagtcatatgacacagggacacagcagcaggagtaagcggagcgcctatccctcgacatcccggggactcaaaacaatgccagaggccaaaaagtccactcacaggcgcggtatatgcgaggatgaatccagccacggcgtgatcatggagaagttcataaaagacgtgtcacgctccagcaaaagcggacgagcaagggagtcctccgatcgcagtcagagatttcccagaatgagtgatgacaactggaaagacataagcctcaataaaagagagagtgtgatccagcagagggtctacgaaggcaatgcattccgtggtggctttaggttcaactctaccctggtgtctcgtaagagagtcctcgagcgcaagcggcgatatcactttgatacagacggcaaaggctccatccacgatcagaaaggttgccctagaaagaaaccatttgagtgtgggtcagaaatgagaaaggctatgtccgtttcaagcctctcgtccttatcaagccccagctttaccgagtctcagccaatcgacttcggcgcaatgccttatgtctgcgatgagtgtggtcgctccttctctgtcatctccgagttcgtcgaacatcagatcatgcacacaagggagaatctttatgaatacggagagtctttcattcacagtgtcgctgtgtctgaagtgcagaaatcccaggtgggcggtaagcggtttgaatgtaaggattgtggcgagaccttcaacaagagtgcagcattggctgagcacaggaagatccacgctcggggatatctagtcgaatgtaagaatcaggaatgtgaagaggcttttatgcccagcccaacattcagcgagttgcagaaaatctatgggaaggacaaattctatgagtgcagagtgtgtaaggaaacattcttgcacagtagtgctctgattgagcaccaaaagatccacttcggggatgacaaggacaacgaaagagagcacgagcgagagagagaaagagaaagaggggaaacctttcggccatctccagccctaaatgagttccagaaaatgtacgggaaagagaaaatgtacgaatgtaaggtgtgcggcgagacctttctccactcatcttcactcaaggagcaccagaaaatacatacacggggaaatcctttcgagaacaaagggaaggtctgcgaggagacattcatccctggccagagcctcaaacggcgtcagaagacgtacaataaagagaagctctgtgacttcacagacggacgcgatgcattcatgcagagttccgagcttagcgagcatcaaaaaatccacagccgcaagaatctttttgaaggccgtggttatgaaaagagtgtgatccattctggaccctttaccgaaagtcagaagtctcataccattaccaggcccttggagtctgacgaagacgaaaaagcgttcacaataagtagtaatccttatgagaaccaaaaaattccgaccaaggaaaatgtttacgaggccaagtcttatgagcgttccgtgatacattcactggcaagcgtggaggcacagaagtcccacagcgtggcaggaccaagcaagccaaaggtgatggccgaaagcacaattcagtcctttgatgccattaaccaccaacgagtgcgagcaggagggaacacgtctgaaggtcgcgagtactcccgctctgtgatccacagtctggtggccagcaagccccctagaagccacaatggaaatgagttggttgagagcaacgaaaagggagaatccagtatttatataagcgatttaaacgacaaaagacagaagatacctgctcgcgagaacccttgcgagggaggctccaagaatcgcaactatgaagacagtgtgatccagagcgtttttagggccaaacctcagaaatccgtccctggcgaaggtagcggtgagtttaagaaggacggcgaattcagcgttccaagcagcaatgtcagggaataccagaaggcacgggctaagaaaaagtacattgaacaccgcagcaacgagacctcagttattcacagcctcccgtttggcgagcagacgttccgcccacgaggcatgctgtacgagtgtcaggaatgcggcgaatgttttgctcattctagtgacctaaccgaacatcaaaaaattcatgatcgtgagaaaccatccggatcacggaactatgaatggtcagtgatccgctctctcgccccaacggacccgcagacatcttatgcacaggaacagtatgccaaagaacaagccagaaataaatgcaaagacttccgccagttctttgctacatccgaggacctgaacaccaatcaaaagatctacgaccaggagaagtcgcacggagaagagtctcagggagaaaatacagatggtgaagaaacacacagcgaagaaacacatggtcaagagactatcgaggatcctgttatacagggaagcgatatggaggatccccagaaggacgacccggatgacaagatatatgagtgcgaggactgtggcctcggattcgtggatctgaccgatctcacagaccatcagaaggtacatagccggaaatgcctggtcgattcgcgtgaatatactcactcggtgattcatacacatagtataagcgagtaccagagggactatacgggcgagcagctgtacgaatgccccaaatgtggcgaatcctttatccattcctccttcttgttcgagcaccagaggatccatgagcaagatcaattgtattctatgaagggatgtgacgatggctttatcgctttgttgccaatgaagcccaggcgtaatagagcagcggaacgaaatccggctcttgctgggtctgccatccgctgcttgctgtgtggccaagggtttatccacagctccgccctgaacgagcacatgcgtctacatcgcgaggatgacctgctggaacaatctcagatggcagaagaggctattattccgggtcttgccctgacagagttccagcgttctcaaaccgaggaacggctgttcgagtgtgcggtgtgtggagaatcattcgtcaatcccgctgagcttgcagatcacgttactgtccacaaaaatgaaccttatgaatatggcagcagctatacccacacttcatttctaaccgagcccttgaagggagctataccattctatgaatgcaaagactgtggtaagtccttcattcacagcactgtgcttacaaaacacaaggagctgcacctggaagaggaagaggaggatgaggcggctgccgctgcggcagccgctgcccaggaggtggaagctaacgttcatgtgccacaagtagtcctgcgtatacagggattgaatgtggaagcagccgaacctgaagttgaggccgctgagcctgaggtggaggctgcagagcccgaggtagaagctgcagagccaaatggtgaagcggaaggaccagatggagaggctgcagagccaatcggcgaggctggacaaccaaatggcgaggctgagcaacccaacggcgacgctgacgagccagatggtgccggaatagaagaccctgaggagcgcgcagaggagcccgaggggaaggccgaagaacccgaaggcgacgccgacgagccggacggggtgggcatagaggatcccgaggaaggggaagatcaggagatacaggtagaagaaccctattatgactgccacgaatgtactgaaaccttcacctcctcaactgctttctctgagcacctgaagacacacgcctcaatgattatctttgagcccgcaaatgccttcggcgagtgttccggatacattgagcgagcatcaaccagcactggaggcgcaaaccaagccgacgagaagtatttcaaatgtgatgtatgcgggcagttgtttaatgatagactttctcttgctcggcaccagaacactcacacaggctag

SEQ ID NO: 31730 - DNA, 3012 bp, synthetic construct
  source 1..3012: mol_type = other DNA; note = Synthetic coding sequence
atgtcacagtggacccccgagtataatgagctttatactctgaaggtcgatatgaaatccgaaatccccagcgacgcgcctaagacccaagagtctctgaaaggcattctgctgcaccccgagccgattggcgctgccaaatctttcccagccggagtcgaaatgattaactccaaagtaggcaatgagttttcgcacctgtgtgacgacagccaaaaacaggagaaggagatgaacgggaaccaacaggagcaggagaaaagcctggtagtgcgtaagaaacgcaaatcccagcaggccggaccgtcctatgtccagaactgcgtaaaggaaaaccagggcatcctcggccttcggcagcatctaggcactccttccgacgaggacaatgattctagcttctccgactgcctctcttcgcctagctcttcacttcattttggagattcagacacagtgacaagtgacgaggacaaggaagtgtctgtgcgacattcccagactatcctgaacgccaaatcccgatcacactctgccaggtcccacaaatggccaaggactgaaacagagagtgtttcaggcctcctgatgaaacgaccatgcctgcacggaagcagtctgcggagactgccttgcaggaagcggttcgtgaaaaacaatagctcacaacgcacccagaaacagaaagagagaattcttatgcagcgtaagaaaagagaagttcttgcgcgaagaaaatatgcacttctacctagctccagtagctctagtgagaacgatctatctagcgagtcttccagttctagctctactgagggggaggaagacctgttcgtgtccgcaagcgaaaatcaccagaacaaccctgccgtgccttccggctccatcgatgaagacgttgttgtcattgaggcttccagcactccgcaggtgaccgccaatgaggagatcaacgtgacaagcaccgactctgaagtcgagattgtcacagttggggagtcctaccggtctcggtcgactttaggacatagtaggagccactggtcacagggctcaagcagtcacgccagccgtcctcaggagccccgtaatcgatctaggatctcaacagtcattcagcctctcaggcagaacgccgctgaggtcgtggatcttaccgtcgacgaagacgaacccacagtcgtgcccacgaccagcgcgagaatggagtcgcaggcaaccagcgcaagcatcaacaattcaaacccctcaacgagcgaacaggccagcgacacagcgtccgcagtgacgtcttcacaaccaagtaccgtcagcgaaacgagcgccaccttaacctcaaacagcaccacggggacctctatcggcgacgatagccgccgaactacatcgtctgccgtgaccgagaccggcccaccggcaatgccgagactcccaagctgctgtccacagcatagcccctgtggaggctcgagccagaaccatcatgcgttgggacaccctcatacatcatgtttccagcagcatggtcatcatttccagcaccatcatcaccaccatcacacccctcaccccgctgtccctgtgtccccgtctttttctgaccccgcttgccctgtagaaaggcccccacaggtgcaagccccttgtggcgcaaacagctctagtggcacctcttatcatgagcaacaggcgctgccagtcgatcttagtaacagtggcatccgcagccatggctctggctcattccacggtgcatctgcttttgacccatgctgcccagtgtcctcaagtcgcgcagcaatcttcggtcaccaggctgctgccgctgcccctagccagcccctaagcagcatcgatggctatggcagttctatggttgcgcaacctcagccacagcctccccctcagccttcgctgagctcttgcaggcactacatgccaccaccctacgcaagtctcacaagacccctgcaccaccaggcaagcgcatgtcctcattcccatgggaacccgccaccgcagacacagcctccacctcaagtggattacgtcattcctcacccagtccacgcctttcacagtcagatttcaagccatgccacttcgcaccctgtcgcccctccaccccctacacatctggccagcactgcagcaccgatcccccagcatttgccgcctacacaccagcctatcagtcatcatatccctgccacagctcccccagcacagaggctgcatcctcacgaggtaatgcagcgcatggaagtccagaggcgtaggatgatgcagcaccccacaggccttttcgtcttctgcgtctcaaggcgagctcatgaacgtccaccccctcatccgcacagaatgcatccaaactacggacatggccaccatattcacgtcccacaaactatgtcttcccatcctcgccaggccccagaacggagcgcctgggaactgggtattgaggccggagtgaccgcagcgacatacactccaggggctttgcaccctcaccttgctcactaccacgcgccaccccgtctgcaccacctccagctcggggctctccctctcatggtaccggatatggctggctacccacatatcagatatatcagcagcggcctggacggaaccagcttccgcggaccctttcgcggtaacttcgaggagctgattcacttggaagaacgcctcggtaatgtgaatagaggtgccagtcagggcactattgaacgctgtacataccctcacaaatacaagaaagtgacaacggactggtttagtcaacgcaaattgcattgtaagcaggacggcgaagagggaaccgaagaagatacggaagagaagtgcaccatctgtctatcaattttggaggaaggagaggatgtacgtcgcctgccttgtatgcacctgttccatcaagtgtgcgtagaccagtggctcattacaaacaagaagtgtcctatttgtagggtcgacatagaggcccagctcccaagtgagagttag

SEQ ID NO: 31731 - DNA, 150 bp, synthetic construct
  source 1..150: mol_type = other DNA; note = Synthetic coding sequence
atggccctccctcacgatagcaatgaaacaagttacctgctcccacccaataacgaggactggggtcgccaaaccattcctgacttcgtctatggccaaaaggacctgatggcagagggcattcaatggcccagaaatgcccctggatag

SEQ ID NO: 31732 - DNA, 375 bp, synthetic construct
  source 1..375: mol_type = other DNA; note = Synthetic coding sequence
atgagggcgtcgccctgcatctcacaaccagccgcttcctggcatccccgtccaagtgcactaagaccaaccgcgggttctggccctgatacgcgcacacctggcaccgttgaggatgggtcagccccttgccctgccttcaggagcccagctgtttcaccctgcggggaggagccttgctgtttccagataagtcccgcagaagagacactcgaacttggcaggctggtctccccaggcaactgcgacaccttgagtccacgagctgctggcttctacgcatgccacgtacgatccctgataccttgtaggagcactaaagggcgatggccgctgacagcttctgctgcaggactatcatccttttctggttag

SEQ ID NO: 31733 - DNA, 93 bp, synthetic construct
  source 1..93: mol_type = other DNA; note = Synthetic coding sequence
atggctacagactcttgggccctggcagtcgatgagcaggaggcagcagccgaatctcgaaccgaactgccaagcccttatagcacgtcgtag

SEQ ID NO: 31734 - DNA, 804 bp, synthetic construct
  source 1..804: mol_type = other DNA; note = Synthetic coding sequence
atgtgggaccagaggctggtcaaactggccttgctccaacacctccgggctttttatggtataaaggtgaagggcgtccgcggtcagtgcgacaggcgtcgccacgagaccgccgctaccgaaatcgggggaaaaattttcggagtgccctttaacgccttgcctcactccgccgtgcctgagtatgggcatattccctcattcctagtcgatgcatgcaccagcctagaggagcatatccacacagaggggctgttcagaaaaagcgggagtgtgatcaggctcaaggccctgaaaaataaggttgatcatggtgaggggtgcctgtcatccgcaccaccctgtgacattgctggattgctgaaacagtttttccgcgagctgcctgagcctatattacctgcggacctgcatgaggctctgctgaaagcgcagcaactgggcactgaggagaaaaacaaagcaattttgttgctcagttgcctcctagctgatcacaccgtgcatgtgctgcggtacttcttcaacttccttcggaatgtgtctttaagatcctccgagaacaagatggactcttcaaaccttgccgttatctttgcccctaatcttctgcagaccagcgaagggcacgagaagatgtcctctaatgccgagaagaagggagtttaccagaccctgtcctggaaacggtaccagccttgttgggtactcatggtttctgttctgcttcaccactggaaggccttgaagaaggtcaacatgaagttactggtgaatattcgagagcgcgaggacaacgtctag

SEQ ID NO: 31735 - DNA, 1113 bp, synthetic construct
  source 1..1113: mol_type = other DNA; note = Synthetic coding sequence
atgggatttaatcgcccttctaaaatacaagaaaatgcccttcccctcatgctggccgaacctccccagaacctaatagcacagtctcagagcggaaccggcaaaacggctgctttcgtgctggcaatgctcagtcaggtggagccagccaacaaatacccacagtgtctttgtcttagcccaacctacgagttggctctgcagacaggcaaggtgatagagcagatgggcaagttttaccccgaacttaagcttgcatacgcagtgagaggtaataagttggagagagggcagaaaattagtgagcagatcgtgatcggtacccccggaacagtgctggactggtgctctaaactcaaatttattgacccaaaaaaaatcaaggtgttcgtgttggacgaagcagacgtgatgattgccactcaggggcaccaggatcaatctattcgtatccagaggatgttgccacgtaactgtcaaatgctgctgttctctgctacgttcgaggactccgtctggaagtttgcacagaaagttgtcccagatccgaatgtgatcaagcttaagcgggaagaggagaccctggatacaatcaagcagtattacgtgctgtgcagtagtagggacgaaaagtttcaggctctttgtaacctttacggggcaattactatcgctcaggcgatgatcttctgccatacgaggaaaactgcatcctggctggctgccgaactgtcaaaggaggggcaccaggtggctttactgtccggagagatgatggtggagcagcgtgccgcagtgatcgagcgcttccgggagggcaaagaaaaagtgttagttactaccaatgtgtgtgctcgcggaatagatgtggaacaggtttcagttgtgattaattttgacctgcccgtggataaggatggtaaccctgataatgagacatatctccatcgcattggtcggacaggcagatttggaaagcggggtctggctgtgaatatggtcgatagcaagcattctatgaacattctaaatagaattcaagaacatttcaataagaaaatcgaacgtttggatacagatgatctcgatgagattgagaagatcgcaaactag

SEQ ID NO: 31736 - DNA, 2712 bp, synthetic construct
  source 1..2712: mol_type = other DNA; note = Synthetic coding sequence
atggccacgagcgccgattcaccaagtagtcctctgggagcggaagacttactgtccgactctagtgaacccccagggctgaatcaggtctccagcgaggtgacgtcacagctgtacgctagtctaagactgtccagacaagcggaggccaccgcaagagcccagctctatctaccttccacttcgccaccacacgagggactagatggattcgcacaggaactgtcacgtagtctgtccgttggcttagagaagaatctcaagaagaaggacggctccaagcacatttttgaaatggagtccgtgcgtggccaactccagactatgctccaaacatctcgtgacacagcttatagagatccgctgatccccggtgcagggtcagaaaggcgtgaggaggactcctttgatagcgacagcacagctaccctgctcaatacgagaccactgcaggacctgtctccaagttccagcgcacaggcattggaggagctctttccaagatatacgtctctacgccctggcccacccctgaaccctcctgattttcaaggccttcgtgacgcgctggattcagagcatacccgtaggaagcattgtgagcgccacatacaatccctgcagactcgcgtgctggagctccagcaacagctcgctgtggccgttgctgctgaccgcaagaaagatacgatgatcgaacagctcgacaaaacgctggccagagttgtggagggttggaaccgacatgaggccgagagaacagaggttcttcggggtttgcaggaggagcatcaagccgcagagcttacacgctctaagcagcaagagactgtgaccaggctggagcaatccctgagcgaggcaatggaggcactgaatcgggagcaggagtctgcgcgactgcaacagcgcgagcgtgaaaccctggaggaggagcgtcaggcactcacactgcggttggaagcagagcagcagaggtgttgcgttctgcaggaggaacgagacgctgccagggcagggcagctgtcagagcatagagagctggagacattacgagccgcactggaggaagagagacaaacatgggcccagcaggagcaccagctgaaggagcactatcaggctctgcaagaggagagccaggcccagcttgaacgtgagaaggaaaagagtcagcgggaagcccaggccgcatgggagacccagcatcagttggccttagttcagagtgaagttcgcagactggagggtgagttagatacagctcgcagggagagggatgctttgcaactggaaatgtcgcttgtgcaagcacggtacgaaagccagcgtatacaactggagtctgagctcgctgttcagctcgaacagcgggttacagagcggctggctcaggctcaagagtcctctctaagacaggccgctagcctgagggagcaccacaggaaacagctacaagacttgagtggccaacatcagcaggagttggcgagccaactggcacaatttaaagtggagatggcggagagggaagagagacagcagcaggtggcagaagactatgaactccgccttgccagagaacaagctagggtgtgtgagcttcagagcggaaaccagcagctcgaagagcagcgggttgagctcgtggaaaggctgcaggcaatgcttcaggcccattgggatgaggcaaaccagctgcttagtaccaccctgccaccgcctaaccctccagcccctccagccggaccttccagccctggccctcaggagcccgaaaaggaagagcgcagagtgtggacaatgccaccaatggcggtggcacttaagcccgtcctacagcagtcacgtgaagcgagagacgaattaccaggcgcacccccagtcttgtgttcctctagctctgacttaagcctgttacttggcccaagttttcagagtcagcactccttccaaccactggagccgaagcccgatctgacatcttctactgcaggtgctttttcagccctgggggcattccaccctgaccatcgggcagagaggccttttccagaggaagaccctggaccggacggcgaagggttgcttaaacaagggctcccccctgctcagctggagggactcaaaaacttcctccaccaattgctggaaacagtgccacagaataacgagaacccatccgtggacctattgcctcccaagtctgggcctctgacagtcccatcctgggaagaggccccacaggtgccgagaatccctccgcctgttcacaaaactaaggtcccactggccatggcatcttcattattccgagtccctgagcccccaagctcccactcccaaggatctggaccttcttcaggctcccctgagcgcggaggcgatggactcacattccctcggcagcttatggaagtgtcacaattgctaaggctttaccaagcccgtggctggggagctcttcccgcagaagacctgctgctgtacctcaaacgactggaacattctggtaccgatgggagaggcgacaacgtcccccgaagaaatactgactctaggctgggagaaattcctcggaaagagatcccctctcaggcagtaccaaggcggctggccaccgcacccaaaaccgagaaaccaccagccagaaagaagtctggacatcctgcaccttcatccatgcgcagcagaggtggggtatggcgctag

SEQ ID NO: 31737 - DNA, 138 bp, synthetic construct
  source 1..138: mol_type = other DNA; note = Synthetic coding sequence
atgcccctccttgtggagggaaggcgggtgcgcctcccacagtctgccggtgatctggtgagagcccaccccccactagaagccccatcccccttttgggtgctcatgatgccactgctcgttaccctgtggtcttag

SEQ ID NO: 31738 - DNA, 1083 bp, synthetic construct
  source 1..1083: mol_type = other DNA; note = Synthetic coding sequence
atggaggagttgagtcaggccctggcctcttcatttagtgtctcccaagacctgaattcaactgctgctccacatcctcgcctgagtcagtataagtccaaatatagctccctggagcagtctgaacgccgaaggcggctgctggaactacaaaagtctaagagattagactacgtgaaccacgcccgacggcttgccgaggatgattggacgggcatggagtcagaagaagagaataagaaagacgacgaggaaatggacattgacaccgtcaaaaagctgcctaagcattacgcaaaccagctgatgctgtcagagtggctaattgacgtgccatcagatttagggcaagaatggatagtggtcgtgtgccctgtagggaagcgtgccctgatcgtggcttctagaggatctacctccgcctacaccaaaagcgggtactgcgttaatcggttttcctccctcctgcctggcggaaatcgtcgtaatagcactgccaaggactacactatattagattgcatctacaacgaagtgaatcaaacctattacgtacttgatgtgatgtgttggagaggacaccctttttacgactgtcagaccgacttccggttttactggatgcactcaaagctccctgaagaggagggtttgggggagaaaacgaaactcaatccttttaagttcgtcggcctcaaaaattttccctgcactccagagtcattgtgcgacgttctctctatggattttccatttgaagtggatggattacttttctaccataaacaaactcactattctccgggatccacccccctggtggggtggctgcgaccctacatggtgtctgatgtgttgggtgtggccgtaccggctggcccactcacgacaaaaccggactacgcaggtcaccagttgcagcagataatggagcacaagaagagtcagaaagagggcatgaaggaaaaactcactcacaaggctagtgaaaacggccattacgaactggagcatttaagtacacccaaattgaagggaagttctcactctcctgatcatcccggttgcctgatggagaactag

SEQ ID NO: 31739 - DNA, 1353 bp, synthetic construct
  source 1..1353: mol_type = other DNA; note = Synthetic coding sequence
atggtccctctggtggcagtggtctcagggccacgggcacaattatttgcctgcctgctcagattaggcacccagcaagtcggccctctgcagctacataccggcgcttctcacgctgctcggaatcactacgaagtcctcgtcctggggggagggtctgggggaattactatggctgcgcgtatgaagcgaaaggtcggcgcagagaatgtggctatcgttgaacccagtgagaggcacttttatcagcccatttggaccctggtcggtgcgggagccaagcagctctcctcttcggggagacccactgcttccgtaataccaagcggcgtagagtggattaaggctcgggttacggaattgaatccagacaaaaattgtattcacacagacgacgacgagaaaatcagttatcgttacttgatcattgcccttggtattcaactcgattacgagaagatcaaaggactccctgagggcttcgctcatccgaagatagggagtaattactccgtcaagacagttgaaaagacgtggaaggccctgcaggacttcaaagaaggcaatgccattttcacttttcctaataccccagtcaagtgtgccggagctccccaaaaaataatgtatctgtctgaggcgtactttcggaagaccgggaaacgctccaaggcaaatatcatttttaacacctccctgggggcaatctttggcgtcaaaaagtatgcggacgcactgcaagagattattcaagagcgaaatcttaccgtgaactataaaaagaacttgatagaggtacgtgccgacaagcaggaggccgttttcgaaaacttggataaaccgggtgaaacacaggtgatctcatacgagatgttgcatgtgacccctcccatgtctcctcccgacgtgctgaaaacctctcctgtggccgacgcggctggatgggtggacgtcgacaaggagacactgcagcatagacggtacccaaatgttttcggtatcggtgactgcaccaacttgccaaccagcaaaaccgccgctgctgtggcagcccagtccggcattttagatagaacaatctccgtcataatgaaaaaccaaacccccacgaaaaaatacgacgggtatacctcatgtcccctggtaactgggtacaaccgagtaatcctggctgagtttgactataaagccgagccgcttgagacatttccttttgaccagagtaaggagcgcttgtctatgtatttaatgaaagctgacctgatgcctttcctctattggaatatgatgctgagggggtactggggcggacctgcctttttgaggaaactgttccatctcggaatgtcctag

SEQ ID NO: 31740 - DNA, 1113 bp, synthetic construct
  source 1..1113: mol_type = other DNA; note = Synthetic coding sequence
atgggattcaatcgcccatcgaagatacaggaaaacgcactgcctctcatgctcgcagaacctccacagaatttgattgcgcagtcgcagtccggaacgggcaagactgccgcattcgttctggctatgctgagtcaggttgaacccgctaataagtatcctcaatgcttatgtttgtcccctacctacgaactggctttacagacaggcaaggtgatcgaacaaatggggaagttctaccccgagctgaaactggcatatgccgtgcgcggtaacaaactagagagagggcagaagatatcagagcaaattgttatagggacacccggtactgttctggattggtgttcaaaattgaagttcatcgatcccaagaagataaaggtcttcgttcttgatgaggccgatgtcatgattgctactcagggccatcaggatcagagtatcaggattcagcggatgctacctcggaactgccagatgctgctatttagcgcaacgttcgaagattctgtgtggaaatttgctcagaaagttgtacccgaccctaatgtgataaaattgaaaagagaggaggagactctggatacaatcaaacagtattacgtactctgttcaagcagggacgagaagtttcaggccctctgcaacctttacggggctattaccattgcacaggcaatgattttctgtcacacaaggaaaacagccagctggctcgcagcagagctctccaaggagggccatcaggtggcccttctctctggcgaaatgatggttgaacaacgggctgctgtgatcgagagattccgtgaagggaaggaaaaagttctcgttaccactaacgtatgtgcgagaggtatcgacgtcgagcaagtcagcgtggtgatcaatttcgatttgcctgtggacaaggacgggaaccccgacaacgaaacctacctccaccggatcggcaggacagggagattcggcaagaggggcttggcagtcaacatggtggatagtaagcacagcatgaacatactgaatcggattcaggagcacttcaacaaaaagattgagagactagatacagacgaccttgatgagatcgaaaaaatcgcaaattag

SEQ ID NO: 31741 - DNA, 738 bp, synthetic construct
  source 1..738: mol_type = other DNA; note = Synthetic coding sequence
atgggcggaggctacgatcttaacttatttgctagtcccccagatagcaacttcgtttgtagcgtctgccacggcgtcctgaaaaggcctgccagactgccttgctctcacatcttttgtaagaaatgtatactgagatggttggctagacagaaaacatgcccgtgttgtaggaaggaggtgaagcgtaaaaaagtcgtccatatgaacaagttgagaaaaactatcggtcgactggaggttaagtgtaagaatgccgacgcagggtgcattgtcacttgcccgctggcccaccgcaaaggtcaccaggatagttgccctttcgaacttaccgcatgcccaaatgaggggtgtacctcccaggtgccgagggggaccttggctgaacatcggcagcactgccaacagggaagtcagcagaggtgtccactgggatgcggtgccacgctggaccctgctgagagagctcggcacaactgctaccgggagctacacaacgcatggagcgtgaggcaagagcgccgtaggcctctcctgctgtctctgctgaggcgcgtgcggtggcttgatcaagcgaccagcgttgtgcggcgagagctggctgaactctcgaatttcttggaggaagatacagcattattggagggcgctccccaagaggaggccgaagcagcgcctgaggggaatgtgggcgctgaggtggttggagagcctcgcgctaacatcccatgtaagtag

SEQ ID NO: 31742 - DNA, 309 bp, synthetic construct
  source 1..309: mol_type = other DNA; note = Synthetic coding sequence
atgagggccagcccatgcataagtcagcccgcagccagttggcaccctaggccgagcgctctgcgtccgaccgcagggagcggaccggacactagaactcccggaactgtggaagatggaagtgctccatgcccagcgtttagaagtcccgctgtatccccatgtggcgaggaaccatgttgcttccagatatctcctgccgaggaaacactcgaacttggtaggttggtgtctcccggttgccataaaagctctgctcctcaagagcgtcggctcgaccccagggcgaggtgcgtcgtacatatctag

SEQ ID NO: 31743 - DNA, 1473 bp, synthetic construct
  source 1..1473: mol_type = other DNA; note = Synthetic coding sequence
atggaagattcggcctctgccagtctcagcagcgccgcagccaccggaacgtccacaagcacaccagccgcacctacagcacggaagcaactcgataaagagcaggtgcgaaaggctgtcgatgcgctgctgactcattgcaagtctcgcaagaacaattacgggttgctactcaatgaaaacgagagtcttttcctaatggtggttctgtggaaaattccttccaaagaactacgcgtgcggttaactttaccacacagtattagatccgactctgaagatatttgcctctttactaaggacgagccaaattcaaccccagagaagacagagcaattctaccggaagctgttgaataagcacggtattaagaccgtgtcacagataatttcattgcagactctgaagaaggagtacaaaagctatgaagccaagctgaggcttctgtcatctttcgacttctttctcacagatgcacggatcaggcgtctgttaccatccctgattggacgacatttttaccagagaaaaaaggtaccagtctccgtaaacctcttaagtaagaacctctctcgcgagatcaacgactgcattgggggaactgtcctaaatatttccaagtctggtagctgcagcgcaatacgcattggccacgtggggatgcagattgagcatattattgagaatatcgtggccgttactaaggggctgtccgagaaacttcccgagaagtgggagtccgtgaaactgttgtttgttaagactgaaaagtcagccgctctccctatttttagttcatttgtgtccaactgggatgaggccaccaaaagaagcctgctcaacaagaaaaagaaggaggctcgccgaaagcggagggaacgcaacttcgagaaacagaaagaacgcaagaaaaaaaggcaacaggcgcgtaaaaccgcctctgtgctgtcaaaagacgacgtggcccctgagtccggggacactacagtgaaaaagcccgagagcaaaaaggaacagactcctgaacacggtaaaaagaaacgaggcaggggcaaagcacaggtcaaagcaaccaacgagtctgaggacgaaatcccacagctcgtgcccatcggcaagaagactcccgctaatgaaaaggttgagattcagaagcatgcaaccgggaaaaaaagccccgcaaagtccccgaacccctccacaccacgcggaaaaaagcgcaaagcactgcccgctagcgaaaccccaaaagcagctgagtccgaaacccccggtaagagcccggaaaaaaaacccaaaattaaagaagaggccgtcaaggagaagtccccgagtctgggaaaaaaggacgcacgtcagactccaaagaaaccagaggccaaattctttaccacccctagtaaatctgtgcgtaaagcctcacacacgcccaaaaagtggcctaaaaagcctaaagtcccccagtccacttag

SEQ ID NO: 31744 - DNA, 1809 bp, synthetic construct
  source 1..1809: mol_type = other DNA; note = Synthetic coding sequence
atggccgagttcagggtgagggtttcaactggggaggcattcggtgctggaacttgggacaaggtgtcggtgtctattgtgggtacccggggtgaatctccaccccttcctctggacaatttgggaaaggagttcacggccggtgcagaggaggattttcaggtgaccttaccagaggacgtgggacgcgtcctgcttctgcgcgttcacaaggcgcctccagtgctgccgctgctgggacccctggccccagacgcctggttttgccgctggtttcaactgacacccccacgaggtggccatctgctgtttccatgctaccagtggctcgagggagcaggcacgctcgtgctccaggaaggcacagcaaaagtctcttgggccgaccaccaccctgtgttacagcagcagcgccaggaagaacttcaagctagacaggagatgtatcaatggaaggcctataaccccggttggccccattgcctggacgagaagacagtggaggatctggaattaaacatcaaatactcaacagctaagaatgcaaatttctacctgcaagccggttcagcattcgctgagatgaaaatcaaggggcttctggaccgcaagggactgtggagaagtctgaatgagatgaaaagaatttttaattttagacgcaccccggctgccgaacatgcattcgagcactggcaagaggatgcatttttcgcttcccaattcttgaacggtctcaaccctgttttgatcagaagatgccattaccttcctaagaacttcccggtcacggacgcaatggtagctagcgtactgggtccagggacatcactccaggccgagcttgagaaggggagtctgtttctggttgaccacggtattttatccggtattcagacgaatgtgataaatggcaaaccacagttctctgccgcacctatgacactgttataccagtcccccggatgtgggccactgctgccgctcgcaattcagctatcgcaaactcctgggcctaattctccaattttcctgcctacagacgacaagtgggactggctgctcgctaagacctgggttcggaatgctgagttctcatttcacgaggctctcacccaccttctgcactcgcaccttctgcccgaggtattcactctcgccacacttcgtcaactgccgcactgtcaccccctcttcaaaagcactggtatcggaatagagggtttttctgagttgatccagaggaatatgaagcagctgaactactccttattgtgcctacctgaggatatcagaacacgtggggtggaagacatccccggatactactatcgagatgatggcatgcagatctggggtattccttcaagcttggagacgagggaagcgctggtgcaatacgtcacaatggtgattttcacgtgctctgccaagcacgccgcagtgagtgcaggacagtttgactcatgcgcctggatgccaaacctcccccctagcatgcagcttcctccgccaacgagcaaaggtctggccacctgcgaaggatttatcgcaacgctgccgccagtcaacgccacatgtgatgtgatcctcgccctttggctactgagcaaagagcctggggatcaacgcccactcggtacctacccggatgaacacttcactgaagaagctcctagacggagtatcgctacctttcagagccgcctagcccagatctcaagaggaatacaggagcgtaaccagggactggtgctgccctacacgtatctggatcctcccctgatcgaaaactcagtgtcaatctag

SEQ ID NO: 31745 - DNA, 618 bp, synthetic construct
  source 1..618: mol_type = other DNA; note = Synthetic coding sequence
atgtccgtggaccccatgacctacgaagctcagtttttcggctttacacctcagacttgcatgctgcgcatctatatcgcctttcaggactaccttttcgaagtgatgcaggccgtggagcaggttatactcaaaaaattagacgggatccctgactgcgatattagtcctgtccaaattcgcaagtgcacagaaaaatttctctgttttatgaaaggccatttcgataaccttttttctaagatggagcagctatttctccagctcattctgcggattccctctaatatcctcctgcccgaggacaaatgcaaagagaccccatacagcgaggaagacttccagcaccttcagaaggagatcgagcagctccaagagaagtacaagaccgagctctgtaccaagcaggcgttactcgccgaactggaagaacagaagattgtgcaggctaagcttaagcagacgttgacctttttcgacgagctacacaatgtgggccgagaccacggcacttcagactttagagaatctctggtctctctcgttcagaactcccggaaacttcagaatatccgggataacgtggaaaaggagagcaaacgcctgaagatctcctag

SEQ ID NO: 31746 - DNA, 360 bp, synthetic construct
  source 1..360: mol_type = other DNA; note = Synthetic coding sequence
atgatattgcaacagcccctgcaacgcggtccacagggcggtgctcagagacttcctcgcgctgcactgggagtgacctggggcttagacgcgcgtgaaccgcttcgaaaacagttcttgtctgaggagaacatggccacacattttagccagctatccctacataatgaccatccatattgtagcccaccgatgaccttctctccggcactgccgcctttaaggagtccttgctctgagctgctactgtggagatatcccggatcactgatccccgaggctctccgcctgctgagattgggtgacacaccatctccaccgtaccctgcgacgcccgctggggatatcatggagctctag

SEQ ID NO: 31747 - DNA, 1473 bp, synthetic construct
  source 1..1473: mol_type = other DNA; note = Synthetic coding sequence
atgcccatgccaacggagggtacaccacctcctctgagcgggacacctattcccgttccggcttactttaggcatgccgagccaggcttttcattgaagagaccaagggggctgagcaggtcactcccaccacctccccctgccaaggggagtattcccatttctaggctcttcccacccaggacccccggatggcaccaactgcagccccgaagggtgtcctttagaggggaagcttcagaaactctccagtcaccgggatacgatccgtctcgtcccgagtcctttttccagcagtccttccagcgattgagcagacttgggcatggaagttacggggaagtatttaaagtcaggtcaaaggaggatggtcggctctatgccgtcaagaggagcatgagtccgttcagaggacctaaagacagggccagaaagctggcggaggtgggatcccacgaaaaggtgggccagcacccgtgttgtgttagactggagcaggcatgggaagagggtggtatactatacctccagaccgagttatgcggcccttctctgcaacagcactgcgaagcctggggcgctagtctccctgaggcccaagtctggggctatctgagggacactctgctcgctcttgcacatctacattcacagggattggtgcatctggatgtaaaacccgcaaatatcttcctggggcctcggggtagatgcaagctgggagacttcggcctgcttgtggaactcggcactgccggagccggtgaagtgcaggagggagatccaaggtatatggcacctgagctgctccaagggtcatacggcactgctgctgacgtcttcagcctgggcctcactattctggaagtcgcttgtaacatggaattacctcacggaggtgagggctggcagcagcttcgccagggatatttaccacctgaatttactgcaggactatcctcagaattgcgctctgttctggttatgatgctggaacccgatcctaaactcagggcaaccgcagaagccttgcttgcactccctgtcctgcgccagccccgagcctggggcgtcctgtggtgtatggctgcagaagccctctcacgaggctgggccctgtggcaggctctattagctctcctatgctggctctggcatggcttggcccaccctgcaagctggctacagcctctagggccacctgctaccccccctggatctcccccatgctctttattgctggactctagcctcagctccaattgggatgatgactccctgggaccaagtttgtcacctgaagctgtgctagcgcgtacagtggggagtacgtctactcctcgatcacggtgtacccctagggacgccttggaccttagcgatattaattcagaaccccctcgaggtagttttccctcatttgagccaagaaatctactttccttgtttgaagatacactggaccctacttag

SEQ ID NO: 31748 - DNA, 1293 bp, synthetic construct
  source 1..1293: mol_type = other DNA; note = Synthetic coding sequence
atgcttgaaaggtggcaccagctccaaccaaggcgggtgtcttttcgaggcgaggcctcagagaccctgcagagcccaggctacgacccatctagacctgaatcctttttccaacagtcttttcagaggttatctcgtctcggccacggttcttacggtgaggtcttcaaagttaggtctaaggaagacgggcgattatatgccgtgaaacgtagcatgagtccattccgagggcctaaggacagggcgagaaaactggcagaagtgggcagccatgagaaagtgggacagcacccctgttgcgttagacttgaacaagcatgggaggaaggaggcattctctacctgcagacagaactgtgcggcccatccttgcaacagcactgtgaggcatggggagcttccttgcccgaggcccaggtatgggggtaccttcgagacaccctacttgccctcgcgcaccttcactcccaggggctggtgcacctggacgtcaagcccgctaacatattcttaggcccaagggggaggtgtaagttaggggattttggacttctggttgaacttggcactgccggagccggtgaagtccaggaaggcgatccgcgttacatggcccctgagcttctccagggtagttacgggaccgctgcagatgtgttcagcctagggctcaccattctcgaggtggcctgcaacatggaactgcctcacggaggcgagggatggcagcagctacggcagggatacctgcctccagagtttactgccggactgagctcggagctccggtcagtcctggtaatgatgctggaacccgatcccaagctgcgcgcaactgccgaggcccttttagccttacctgtgctgaggcagccacgggcttggggagtgctctggtgtatggccgctgaggcactgtcgagaggttgggcactttggcaagccctcttggcactcctctgctggctctggcacggattggcccatccagcttcctggctccagccactcgggcctcctgccactccacccggatcaccaccctgctctttgctgctcgattcgtcgctcagctccaattgggacgacgactcacttggtccttcactgagccccgaagccgtgctggctaggactgtggggagcacttctactcctcggtcccggtgcacccctcgcgacgcccttgacctttcagatattaacagtgagccccctcggggttcattcccatcttttgagccacgcaacctgctgtcgctgtttgaggacactctggacccaacttag

SEQ ID NO: 31749 - DNA, 666 bp, synthetic construct
  source 1..666: mol_type = other DNA; note = Synthetic coding sequence
atgcaggtgcaggatgatggggtgaaccttataccgttcgccaaatgcagtagagtggtcagccggagcccacctcctagattgccttcacagagtctgcggccaatgccccagcgctacggggacgttttttggaaaaacctgaatcaacgcccaacgcctacttggctggaagaacagcatataccccctatgctcttgcccccacctgagatgctgtggaggagaaagaagaggaggccctgtctggaaggaatgcagcagcagggcttgggtggagtcccggcaagagtgcgtgccgtaacctaccatctcgaagacctgaggcgtcgccaatcgatcataaacgaacttaaaaaagcccagtggggcagcagtggggctgcgagtgaacctgtggtgcttggggaagaaggctgcggctttccgagcactaacgagtatccagacctcgaggaggagagggctacctatccccaggaggaagaccgcttcctcacccccggtcgggcacagctgctgtggtctccttggtcccctctagatcaagaagaggcttgtgcttctcgacagctgcacagcttggcctctttctcaaccgttacggcacggagaaacccattacacaacccttgggggatggagctcgcagccagtgaagaatag

SEQ ID NO: 31750 - DNA, 2232 bp, synthetic construct
  source 1..2232: mol_type = other DNA; note = Synthetic coding sequence
atggaggccgctgctgtgacagttacacgctccgcgacccggagacgacgtcgccaactgcaaggtctagctgctcccgaggctggaacgcaagaagaacaagaagatcaagaaccgagacctcgaagacggagaccaggccgtagcatcaaggacgaggaggaggagacggtgtttagggaagtggtgagctttagtcccgaccctctccccgtgcgctattacgataaggacactaccaaacctattagtttttatctgagttctttggaggagctgttagcatggaagccacgactggaggacggttttaacgtggctctggaacccttggcctgcaggcaacctccactttccagtcagcgtccacgaacactgttgtgccacgatatgatgggcggatatctcgacgaccgctttatacagggatccgtagtgcagacaccttatgcgttctatcattggcaatgcatcgatgtctttgtttacttttctcaccataccgtgactattccgccagtgggatggactaacactgcacatcggcatggcgtgtgcgtgctgggcactttcattaccgagtggaacgaagggggtaggctctgtgaggcgttcctcgcaggcgatgagagatcctaccaagccgtcgccgacaggctggtgcagattacccaattcttccggtttgacggctggctgattaacatagaaaatagtctctctctcgctgccgtgggaaacatgcctccattccttaggtaccttaccacccagcttcaccgccaggtcccgggaggactagttctgtggtacgattctgttgtccagtcgggtcaactgaagtggcaggacgaactaaaccaacacaatagagtgttttttgacagttgcgatggattttttactaactacaattggagggaggagcatctcgaaagaatgcttgggcaggcaggtgaaaggagagcagatgtatatgtgggcgttgacgtgtttgctagaggcaacgttgtagggggacggttcgacacggacaagtccctggagttaatcagaaagcatggattcagcgtcgctcttttcgcgcctggttgggtatacgaatgcctggaaaaaaaggattttttccaaaaccaggacaagttctggggtagactggaaagatacctgccaacccactccatctgctctctccctttcgtgacctccttttgcctgggaatgggagccaggcgcgtgtgttatgggcaggaggaggctgttgggccatggtatcatctgtcagcccaggagatccagccgctcttcggggaacaccgcctgggaggagacggacggggttgggtcaggacccactgctgtcttgaagacgcatggcatgggggatcaagtctactggtcagaggcgtcatcccaccagaggtcggaaatgtggcagtgcggctgttcagccttcaagccccagtgcctccaaagatctatctgtccatggtctataagctcgaggggcctacagatgtgactgtggccttagaactgactactggggatgctggttcctgccatatcggagggatcagcgtattgaatgccgagacttcttcaaggcattcattgcggcctttgcgggtaccacccactaagctggccaggtgggttggtcgctgcggcagacaactctctggtggctgggtgcagcattgttatgaggttagcctgagaggctgtctcctgctggacctcttggtgtgtttcagtcgccctccaggttcccgagaagaagaaagctttacttgtaggctgggtgagattcaagtggttgatgccgcaagcttgctcgcaccactgccccaagtgcaggccgtcaccatttctcatatcagatggcagccttcagcctccgaacgcgagggacctcccgctctgctccagttgtcatgcacgctgcattggagctttttgttgtcacaagtgcgttgcttccgaatccattgttggggcggaatgtccgacgactcccctggacgagagctgcccaggcccgaaatgccgatgttcttaggcctcgcctttgcaacccagtaccgaatcgtggatctgctggtggaagctgccggacccggtcaggatagaagaatggaattcctcgtcgagcctgtgcccaaggaggggttccgggtcccacaggcggagtggggcagagctgtccttctctacagcgctcctgcttag

SEQ ID NO: 31751 - DNA, 579 bp, synthetic construct
  source 1..579: mol_type = other DNA; note = Synthetic coding sequence
atgagtacagcagctgtacccgagcttaagcagatttccagagtggaggccatgagattaggcccaggatggagccatagctgccacgcaatgctgtatgccgcaaaccccggtcaactgttcggccgtattccaatgaggttcagcgttctgatgcaaatgcgcttcgatggtcttttaggctttcctgggggattcgtagatcggagattctggagcctggaggatgggctcaaccgggtgctgggcctgggattgggttgtctcaggctgactgaggccgactacctctccagccacttgaccgaaggaccacaccgagtggtggctcatttgtacgccagacagctcacactggagcagctgcatgctgtcgaaatttcagccgtccattctcgggaccacggccttgaagtgggccctcctccgggacctcgccctccgcctcgcggactggccttagcgccttggaaggctcccatgggcgcagggcctcgggcagggccagcggtgcaccctgaaggccctagtcgtcggttacctcagctgccggagcaaagactgcgagagcacggctag

SEQ ID NO: 31752 - DNA, 2553 bp, synthetic construct
  source 1..2553: mol_type = other DNA; note = Synthetic coding sequence
atgctggagcgccgagccctcctgtggcagcgtgaggccggaccagggtggggggatagagctcgagcgggtacgggtggagccggtggcggttgtggcggagcaatggccgaacgcggacccgcattttgcggtctttacgacacctcttctctgctgaggtactgcaacgacgacaacctgagcgggacaagcgggatggaagtggacgatcgagtgtcagccctggagcaacgtctgcagctgcaggaggacgaactagcagttctcaaggcagccctcgctgacgcattaagacgtctccgagcttgtgaggagcagggagcagccctacgcgctcgtggaacaccaaagggtcgcgcacctcctaggctcggtactacagcgtctgtctgccagttgttaaagggcctccccaccaggacgccgttgaatggatctggccctcctaggcgtgtgggcggatacgcgacatccccgtcttcccccaagaaggaggctacctctggtcgatctagcgtaaggcggtatctgtccccagagaggctggcctctgtgagaagagaagatcctaggtctcggactacgtctagctcatccaactgctcagctaaaaaggaagggaagactaaggaggttattttctctgtggaggacggttcagttaagatgtttctgagggggaggccagtccctatgatgatccctgacgaactggcaccaacttacagtctggataccaggagcgaacttccctcctgtcgattgaagctggaatgggtgtatggctataggggaagggactgtcgtgcgaacctgtacctgctccctactggggagatagtatactttgttgcttcagtagccgtgttgtactcggtggaagagcagcgtcagcggcattatctcggccacaacgacgacatcaaatgcttggccatccaccccgatatggttacaatcgctactgggcaggtggctggcactacaaaagagggcaagccactccctccacacgtccgcatttgggattccgtgagcttatcaacacttcacgtcctcgggctaggcgtctttgatcgggcagtgtgttgcgtaggttttagcaaaagcaacgggggtaaccttctctgtgctgttgatgagagcaatgatcacatgcttagtgtttgggactgggccaaagagacaaaagtggtggatgtaaaatgcagtaatgaggccgtcctagtcgcaacctttcatcctaccgaccccacagttctcatcacctgtggtaagtcccacatctacttttggactttggaggggggttcactttcgaagaggcaaggactgttcgaaaaacatgaaaaacctaaatacgtgctgtgtgtgacattcttggaaggcggagatgtggtcacgggcgactcgggtgggaatctgtacgtgtgggggaagggaggcaacaggattacccaggctgttctgggcgcacatgatgggggtgtgtttggactctgcgccctcagggacggtacattggttagtggcggaggcagagaccgccgtgttgttttatggggatctgattacagtaagctccaggaggttgaagtaccggaggacttcggtcccgttcggactgtggctgaggggcacggcgatactctgtatgtcggtacaacccgtaattcaattctgcagggttcagtccatactggtttcagcctgctggtgcaagggcacgtggaggagctgtggggcctggccactcatccctcccgggctcaattcgtcacttgcgggcaggacaagctcgtacacctctggtccagtgacagccaccaaccgctctggtcaagaatcattgaggatcccgctcgctctgctggcttccacccttctgggagtgtcctcgcagtggggaccgtgacaggacgttggctgctattggacaccgaaactcacgatttggtggccattcatactgacggtaatgagcagatcagcgtggtatccttttccccagacggcgcatatctcgcagtgggttcacatgacaatctggtttacgtctatacagttgaccagggcggacgtaaggtaagcagactgggaaaatgtagtgggcatagttccttcatcacccatttggactgggctcaagattcctcctgctttgttaccaactccggagactacgagatcctctactgggatccagccacgtgcaagcagataactagtgctgacgctgtgagaaacatggagtgggctaccgctacctgtgtattaggattcggagtgtttggcatctggtcagaaggagcagacggaacagatatcaacgccgtcgcccgaagccatgacggcaagttgttggcttccgcggacgatttcggcaaggtacaccttttcagctacccatgctgccagcctagggctttaagccataagtatggaggccactcaagccacgtaaccaatgtagctttcctgtgggacgacagtatggccctcactacaggaggaaaggacacttctgtgctgcaatggagggtagtgtag

SEQ ID NO: 31753 - DNA, 2502 bp, synthetic construct
  source 1..2502: mol_type = other DNA; note = Synthetic coding sequence
atggcggtcgaggacagcaccctgcaagtggtggttagggtgagacctcccaccccacgcgagttagactcacaaagaagaccggtggtgcaggtcgtcgacgagcgagtgctggtcttcaaccctgaagaacctgatgggggttttcctggtctgaaatggggcggaacgcacgacgggccaaagaagaaggggaaggacctcacattcgtatttgaccgcgttttcggtgaagctgccacccagcaggacgtctttcagcatacgacacactccgtcttggacagtttcctgcagggttacaactgctccgtatttgcatatggagctactggtgcgggaaagacccacacgatgctgggtcgggagggggatcccggtatcatgtacctgacaaccgtggaactgtatcggcgactcgaagcacgccagcaggagaaacacttcgaagtgctgattagctaccaggaagtgtataacgaacagattcacgatctgctcgagcccaagggaccgttggcaattagagaggatcccgacaagggggtggtggtacagggtttgtctttccatcagcccgcttctgccgagcagctgctggaaatacttacccgaggaaatcgtaatcgcactcagcaccctactgatgccaacgctaccagttcgcgctctcacgctattttccagatctttgtcaagcagcaggatagagtgcccggtttgacacaagctgtgcaggtcgccaagatgtctctgatcgatttggctggctccgagcgcgcaagtagtactcatgcaaagggcgaaaggctgcgcgaaggagcaaacatcaaccggtcactactggctcttattaacgtccttaatgcattggccgatgccaaaggacggaagacccacgtcccctatagggacagtaagctgacgcgactgctcaaggatagcttgggtggcaattgcaggacagttatgatcgcagccatttcgccttcctctctcacctacgaagacacgtataacaccttgaagtatgccgaccgggctaaagaaatccggctctctctgaaatccaatgtgaccagcctcgattgccatatttcccaatatgctaccatatgccagcagttgcaggccgaagtggctgcactgaggaaaaagctgcaagtctatgagggtggcggacagcctccaccacaagacttgcccggttctcccaagtcgggtccacctccagagcacctgccgagcagtccccttcctccccacccgccatcacagccatgcacacctgagctgcctgccggtcctagagccctccaggaagagtcccttggtatggaggcacaagttgaacgggctatggagggaaacagctctgatcaggagcagagtccagaagacgaggacgagggaccagccgaggaggtgccaacccaaatgcctgaacagaatcctacacatgcgcttcccgagtctccaagactcacactccagcccaagccagtggttggacacttttctgccagggagctggacggcgatcgcagtaagcagctcgctctgaaagtgctgtgcgttgcacagaggcagtattctctgttacaagcggctaatctgctgacaccagacatgattacagaattcgagacactgcagcagttagtgcaggaggagaaaatcgaaccaggggcagaagcccttcggacctccggtctggccaggggagcacccttagctcaggaactgtgttctgagtccatacccgtgccaagtcccctgtgtcccgaaccccctggatacactggacccgtaacacgcacaatggcgcgaaggctatccgggccactccataccctgggaattccacccggaccaaattgcacccccgcacaaggctcaaggtggcccatggaaaaaaagaggcggcgaccatcagctctcgaggcagactcccccatggctccaaagaggggcactaaacgccagcgacagagctttctgccgtgtctgcggagaggatctctaccagacacacagccaagccagggtccctcgacgcctaagggtgaacgcgctagctccccgtgccattcaccacgcgtatgcccagccaccgttatcaagtcacgcgtgcccctgggcccatcggccatgcagaactgtagtacgccactggccctcccgacaagagatttgaatgccacctttgacctcagtgaggagcctccatctaagcctagttttcacgagtgcattgggtgggacaagatacctcaagagctctcaaggctggaccagcctttcatcccacgcgcacccgtaccattgttcacaatgaagggtccgaaacctacgagctctctccccggaacttctgcttgtaagaagaaacgagttgccagttcaagcgtatcacatgggagatccagaattgccagacttccatcttcgacactgaagcgcccagcgggtcctctggtgctgcccggagattggcattag

SEQ ID NO: 31754 - DNA, 3351 bp, synthetic construct
  source 1..3351: mol_type = other DNA; note = Synthetic coding sequence
atgtatggtagtgccagatctgtgggaaaggttgagccatccagccagtcccctggaagatcacctaggctgccacgatccccacgactcggccaccgtcggaccaacagcactggaggttcatccggatcatccgtggggggtggaagcggaaagactctcagcatggaaaacattcagtctctcaatgctgcctatgccacctcaggccctatgtatttgtcggaccatgaaaatgttggcagcgaaaccccaaagtcaacaatgacgcttgggagaagcgggggaagattaccttacggcgtcaggatgacagcgatgggctcttccccaaacatcgcctcatctggcgtcgcatcagataccattgcattcggagagcatcacctgcctcccgtttctatggcctctacagtgccccactcgctgaggcaggccagagacaatacaatcatggacctgcaaacacaactcaaggaagtgctgcgggagaacgatctactgcgaaaggatgtcgaagtgaaagaatccaaactcagcagctcaatgaattccataaaaaccttctggtcaccggaactgaaaaaagagcgcgctctgcgaaaggatgaagccagtaaaatcactatctggaaggaacagtacagagtcgtacaggaagaaaaccagcacatgcaaatgaccattcaggctctccaggacgagctgcgtattcagagggacctgaaccagttattccaacaggactccagctctaggactggagaaccttgcgtcgccgaattgacggaagaaaatttccaaaggctacacgctgaacacgagcgacaggcaaaggaactattcctgcttcggaaaacccttgaggaaatggaactcaggatcgagactcaaaagcaaacactcaacgcacgcgatgagagtataaagaaactgctggagatgctccagtccaaaggtctcagcgcgaaggcaactgaagaagaccacgagaggaccagaagactggccgaagccgaaatgcatgtgcatcatctggaaagtctgttagaacagaaggaaaaggaaaattccatgctgagagaggaaatgcatagaagattcgagaacgcccctgattccgccaaaaccaaagctctccaaacagtgatcgaaatgaaggacagcaagatttcgagtatggaacgcggtctcagagacctggaggaggagatccagatgttaaaatctaacggagccttatcaacagaagagcgcgaagaggaaatgaaacagatggaggtgtaccgaagccacagtaagttcatgaagaataaagtggaacagctgaaggaggagctgtcctccaaggaggcacagtgggaggagttaaagaaaaaggctgcgggtctccaagcggagatcgggcaggtaaaacaggagctgagtcggaaagatacagaattactggccttacaaaccaaactcgagacactgactaatcagtttagtgattctaaacagcatattgaggttctgaaagagtctctgacagccaaggagcaacgagcagctattctccagaccgaagtggacgccctgcgcctgcggctggaagaaaaagagaccatgctgaacaaaaagaccaagcagatacaggatatggccgaggaaaaaggcactcaggccggagagattcatgatttaaaagacatgctcgacgtgaaggagcggaaggtgaatgtcttgcagaaaaaaatcgaaaatctgcaggagcaactcagagataaagaaaaacaaatgagcagcctaaaagagcgtgtgaagtccctgcaggctgacaccaccaacacggacaccgccctgactactctcgaagaagcgttggctgaaaaggaacgtacaatagagaggctgaaggaacaaagggaccgcgatgagagagaaaaacaggaggaaatcgataactataagaaagatctaaaagacctgaaggagaaggtgagtcttctccaaggtgacctgtccgaaaaggaggccagcctccttgatttaaaggagcatgccagcagtctggcttcaagtggcctgaagaaagacagccgtctcaagacgctggagatcgcgctggagcagaagaaggaggagtgtctgaaaatggaatctcagttgaaaaaggcccacgaggctgctttggaagccagagcaagccctgagatgtcagacagaattcagcacctcgaacgtgagatcacaaggtacaaggatgagtctagtaaagcacaggcagaagtcgatcggctactggaaattctcaaggaggtagaaaacgagaagaacgacaaggacaagaaaattgccgagctggaaaggcaggttaaagatcagaataaaaaggtggctaacctcaaacataaggagcaggttgagaagaaaaagtctgcgcaaatgctggaggaagcaagacgcagggaggataatctcaacgatagtagccagcagttgcaggacagtctccggaaaaaagatgatcgaattgaagagctggaagaagccttgcgagaaagtgttcagatcactgccgagcgggagatggtgcttgcccaagaggagagtgccaggaccaatgccgagaaacaagttgaagagctgctcatggcaatggagaaagttaagcaggagctggagagtatgaaggcaaagctgtcctccacgcagcagtccctggcagaaaaggagactcaccttactaatttacgggctgaaagacgtaaacacctcgaggaagttctggagatgaagcaggaagctctcctggcagccatcagtgagaaggacgcaaacatagcacttctcgaactttcgagttccaagaagaagacccaggaggaagtcgctgcacttaagcgggagaaagaccgcctcgtgcagcagcttaagcaacagacccaaaataggatgaaacttatggccgataactacgaggatgatcacttcaagtcctcccacagcaatcagactaaccacaaaccatccccggatcaaatcatccaacccttgttggaactagaccagaatcgatctaaactgaaattgtatatcggccatctgaccacgctctgccatgatagggatcctctaattctcagaggtttaacgccgccagcctcttacaatcttgatgacgaccaggcagcttgggaaaatgaactgcagaagatgacacgaggccaactccaggatgaattggaaaagggagaacgggataatgccgaattacaggagttcgccaacgccattctgcaacaaatcgcagatcattgcccagacattctggagcaggttgtcaacgctttggaggaaagctcttag

SEQ ID NO: 31755 - DNA, 2055 bp, synthetic construct
  source 1..2055: mol_type = other DNA; note = Synthetic coding sequence
atgatccctccccaggaagcatctgccaggaggcgagaaatagaggataagcttaagcaggaagaggagaccctctcctttataagggactccctggagaagagtgaccagcttactaagaatatggttagcatcttgagttctttcgagtctcgactgatgaagctggaaaatagcattatccccgtgcataaacagactgagaacctgcagagactccaggagaatgtggagaagactctttcctgcctggaccatgtaatcagttattatcacgtagctagcgacactgaaaagatcatacgcgagggacctacaggtcgccttgaggaatacctcggctcgatggctaagatacaaaaggcagttgaatactttcaggacaattctcctgatagtccagagttgaacaaggtgaagttgcttttcgagcggggtaaggaggccctagagagtgagttccggagtcttatgaccaggcacagtaaagtggttagcccagtgctgattttagacctgatcagcggagatgacgacctggaggcacaagaggacgtgacactggaacacctgcccgaatctgtgcttcaagacgtgattagaatcagcagatggctggtcgagtatggccgtaatcaggactttatgaatgtctattatcagatccgctcaagtcaactggataggtccatcaagggcctcaaggagcatttccacaagtcttccagttcgtccggcgtgccttatagccccgcaatcccaaacaagagaaaggatacaccaaccaagaaaccagtgaagcgacctggcactattagaaaggcccagaacctactcaaacagtatagtcaacacggacttgacgggaaaaagggtggatctaacctgattccactagaaggcagggatgacatgcttgatgtcgaaacagacgcctatatccactgtgtcagcgcctttgtgaagctcgctcaatcagaatatcagctgctggccgatattatcccagagcaccatcaaaagaaaacatttgactccctgattcaggatgcccttgacggactgatgctggaaggtgaaaacatcgtttctgcagccagaaaagccatcgtgagacatgatttctccaccgttctgaccgtcttccccatcctgaggcacctcaagcagactaaaccggagttcgatcaagtcctgcaagggaccgcggcaagcacaaagaataaattaccaggcttgattacttccatggagaccataggagccaaagctctcgaggatttcgctgataatattaagaatgatcccgataaagagtacaatatgccaaaggacggtactgttcacgagctgacctccaacgcaatcctgtttctgcaacagttgctcgactttcaggagactgccggtgcgatgctcgctagccaagagaccagctctagtgccacttcttactcatccgagtttagcaagcgtctcctgagcacatatatctgtaaggtgctgggcaacctgcagctgaatctcttatccaaatctaaggtgtatgaggatcccgctttatccgccatctttctgcacaataactataactacatactaaaatctctggaaaagtctgagctgatccagctcgttgccgtgacacagaaaaccgctgagaggtcataccgcgagcatatcgagcaacagattcagacgtaccagagatcatggttgaaagtgactgactatatcgcagaaaaaaacttgccagtgtttcagcccggagtcaagctgcgcgacaaggaaagacagataattaaggagcgcttcaaaggttttaatgacggacttgaggaactgtgtaagatccagaaagcttgggcaatcccagacaccgaacagcgcgatcggatcagacaagcacagaagaccatcgtgaaggagacctatggagcttttctgcaaaaattcgggtcagtgcccttcacaaagaaccccgagaagtacatcaagtatggtgtggaacaagttggcgatatgatcgataggctgtttgatacctccgcctag

SEQ ID NO: 31756 - DNA, 378 bp, synthetic construct
  source 1..378: mol_type = other DNA; note = Synthetic coding sequence
atggccgacgaagaactcgaggccctcaggaggcagcgactagctgagctacaagcaaaacacggagaccccggagacgccgctcagcaagaagcgaaacaccgggaagcggaaatgcgcaactccatactagcgcaggtcttagaccaatcagcccgagcgagactgagcaatctggctttagttaaacctgagaaaactaaggcagtagagaactacctaatacagatggcaagatacgggcagcttagcgagaaggtgtcagagcagggactcattgaaatactcaagaaggtcagccagcaaaccgagaagactaccacagtgaagtttaaccgcaggaaggtgatggattcagatgaagacgacgactattag

SEQ ID NO: 31757 - DNA, 3327 bp, synthetic construct
  source 1..3327: mol_type = other DNA; note = Synthetic coding sequence
atggcactgcgcccaggcgctggctccgggggtggcggagccgcaggagcaggagccggatccgctggagggggtgggtttatgtttcctgtggccggagggatccggcctcctcaagccggactgatgccaatgcagcaacagggctttcctatggtaagcgtgatgcagccaaatatgcaaggcatcatgggcatgaattacagctcacagatgagtcagggccctattgcaatgcaagccggaattcccatgggaccaatgcctgccgcaggaatgccttatcttggacaagccccattccttggaatgaggccccctggacctcaatatactccagacatgcagaagcaattcgctgaagagcagcagaaacgatttgaacagcagcagaagctattggaggaggagcgcaaacggaggcagtttgaggaacagaagcagaagctgcggttgttgtccagcgtgaaacctaagacaggcgagaaatcaagagacgacgcacttgaggccattaaaggaaacttggacggcttctctcgagatgcaaaaatgcatcccaccccagcctctcaccctaaaaagccaggcgtgggagtttttccaagccaggacccagcccagccacgcatgcccccatggatctataacgagtcacttgtccctgatgcctataagaagattttggaaacaacgatgacccccactgggatcgacactgccaagctgtatcctatcttgatgagttctgggctgcctagagaaacactcggacagatttgggctctggctaatcggacaacccctggaaagttaaccaaagaggagctttacacagttctcgctatgatagcagtgacacaagtggtgaagccagaggaggacgattttcaggatttccaggacgcaagcaagagcggatccctcgacgactctttctccgatttccaggaactgcctgcatcttccaaaacatccaatagccagcacggcaactccgccccttccctcctgatgcccctacccggtactaaggcgctgccgtctatggacaagtacgcggtgtttaagggaattgcagcagataagtcatccgaaaatacagttccacccggagacccaggagataagtactcagctttccgcgagcttgaacagaccgcagagaataagccgttaggtgagagtttcgccgaattcaggtccgcaggaacagatgacggctttactgacttcaaaacggccgactctgtctcccccctcgaacccccaaccaaagataaaacatttcccccttcctttccttccggaacgatacagcaaaaacagcagactcaggtgaaaaatcccttaaacctggccgacctcgatatgttctcctcagtgaattgctcctctgaaaagccgctgtccttttcggcagtgttctccacctcaaagtccgtgtctaccccccagtccactggctcagctgccactatgactgccctggcagccacaaagactagctcactggccgacgactttggcgagttcagcttgtttggtgaatacagcggcctggcccctgtgggtgagcaggacgatttcgcagacttcatggccttctccaattcgtccattagtagcgaacagaaacccgatgacaagtatgacgcactcaaggaagaggcaagtccagtgcctcttacttcaaatgtcggctctaccgtaaagggtggtcagaacagcaccgccgcttccacaaagtacgacgtattccggcaattgtcactggaggggtcggggttaggagtggaggatctaaaggataacaccccttccggcaagagcgatgatgattttgctgattttcacagctctaaattctctagcattaactcagataagagtttaggggaaaaagccgttgcttttagacacactaaggaggatagcgcctctgtcaagagcttagatctgccgtccataggcggatccagcgtcgggaaggaagacagcgaagacgccttatccgttcaattcgacatgaagctggctgacgtcggcggagacctaaagcacgtgatgagtgacagtagcctggacctgccaacagtgtcgggccaacaccctccggcagccgctggctccggtagtccctccgccacgtctattctgcagaaaaaagaaaccagctttggtagctccgaaaacattaccatgacctccttgagtaaagtcactacattcgtttccgaggacgccctgcccgagacaacattcccggcactggcctcctttaaagatacaatcccccagacctccgagcagaaggagtatgagaacagggattacaaggactttactaagcaggacctgccaaccgcagaacggtcccaggaggctacctgtcctagcccggcatccagcggggctagccaagagactccaaatgagtgcagcgatgactttggggagttccagtcagaaaaaccaaaaatctcaaagtttgattttttggtggccacctcacagagtaaaatgaagagtagtgaggagatgattaagtccgagctggccacttttgatctgagcgtgcagggctcccacaagagatcgctttccctgggcgataaggaaatttcacggtcttccccctcaccggcactggaacagccgtttagagaccgcagtaacacattgaacgagaagcccgctctccctgtgatacgggacaaatataaggacctcacaggggaggtggaagagaacgaaagatacgcttacgaatggcagaggtgcttaggctctgctctaaatgtgataaagaaggccaacgatacgctcaatggcatttcctcaagcagcgtctgtactgaggtgatccagtcggcccagggaatggaatatctacttggcgtcgtcgaggtgtaccgagtgactaaacgcgttgagctgggcattaaggcaacagctgtatgttccgagaagttacagcagctgctcaaggatatcgacaaggtttggaacaacctgattggttttatgtcactggccaccctaacaccggatgagaattcactggacttctcctcgtgtatgcttcgcccagggattaaaaatgcacaggagttggcatgtggtgtctgcctgctaaacgtggatagccgatcccgtaaagaggaaaaacctgctgaggagcatcccaaaaaagctttcaatagcgaaacagattccttcaaactcgcatatggaggacatcaataccatgcaagctgcgccaacttttggataaattgtgtggaacccaagcctcccggtcttgtgttgcctgatttgctgtag

SEQ ID NO: 31758 - DNA, 594 bp, synthetic construct
  source 1..594: mol_type = other DNA; note = Synthetic coding sequence
atggcagccttccgagacattgaagaggtgtcccaggggctactgtcgctgcttggcgctaacagagcagaggcacagcaaagaaggctattgggacgacatgagcaggtcgttgagcgcctactggagactcaggatggtgccgagaaacagctgagagagatcctgactatggaaaaagaggtcgcgcagtcattgcttaatgcaaaagagcaggtgcaccaaggtggggtggaattgcagcagcttgaagccggtttgcaggaagctggtgaggaggataccaggcttaaggcctcactgctccaattgacacgagaactcgaggagctcaaggagattgaagcagacctagaaaggcaagaaaaggaggtggacgaagacaccaccgtcaccattccttccgccgtctatgtggcccagttgtaccatcaggttagcaaaatcgaatgggattatgaatgcgaaccaggcatggtaaaaggcatccatcacggaccgtctgtagcccagccaatccacttggattcaactcagctgtctcggaaattcatcagcgactatctgtggtctttggtagatactgagtggtag

SEQ ID NO: 31759 - DNA, 906 bp, synthetic construct
  source 1..906: mol_type = other DNA; note = Synthetic coding sequence
atgacaagacatgggaagaattgcaccgctggggcagtgtatacataccacgaaaaaaaaaaggacacagccgcttctggatatggcacccagaatattaggttgagtcgggacgccgtgaaggatttcgactgttgttgcctctcgctgcagccgtgtcatgatcctgtggtgacacctgatggatatctgtacgaaagggaagccattttggaatacatcttgcatcagaagaaagaaatcgcccgacagatgaaggcatatgaaaagcagcgagggacccgcagggaagagcagaaagagcttcagcgcgctgctagccaggatcatgtgcgcggattccttgaaaaggaatccgctatagtgtcccggccacttaacccgtttacagcaaaggctctttctggaacttctcccgatgatgttcagcccggacccagcgtcggtcctccgtctaaagataaagacaaggtactgccaagtttctggatcccctccttgactcctgaggccaaggcgacaaagttggaaaagccttccagaaccgtaacctgtcccatgagcggaaaaccactaagaatgagcgacttgactcccgtgcacttcacgcctttggactcatctgttgatagggtaggcctcataactcgctcagaacggtatgtgtgtgcagtgacaagagactccttgtctaatgctaccccctgcgccgtcctgagacctagcggagccgtggtgaccttggagtgcgtggaaaaattgatcaggaaggacatggttgatcctgtgacaggagataagttaactgatagggatattatcgtacttcagcgcggaggcacaggttttgcaggttccggcgtcaagttacaggccgaaaagtcaaggcctgtcatgcaagcctag

SEQ ID NO: 31760 - DNA, 990 bp, synthetic construct
  source 1..990: mol_type = other DNA; note = Synthetic coding sequence
atggaggtggcggagccatcttcgcctaccgaggaagaggaggaggaggaagagcattctgcggagcccaggcccagaaccaggtctaaccccgaaggtgcagaagatagagccgttggtgcccaggccagtgtaggctctcggagcgagggagagggcgaagccgcatccgccgacgatggctcactgaatacatctggggcagggccaaagagttggcaggtgccgcctccagccccagaagtgcaaatacgcactccgagggttaactgtccagagaaggttattatttgtctcgatctcagcgaagaaatgtccctgcctaagctagaatcatttaatggctctaagacaaatgctctaaatgtatcacagaaaatgattgagatgtttgttcgcaccaagcataagatagataagagccacgagtttgctctcgtcgtggtcaatgacgatacagcttggctaagcggtctgacgtctgaccctagagagctatgttcttgcctgtatgatctagagactgccagctgttccacctttaacctcgagggacttttcagcttaattcaacaaaagactgagttaccagtgacagagaatgtgcagacaatccccccaccctacgtggtccggactattttggtctattcacggcctccatgtcagcctcagttctcactgacggagcctatgaagaagatgtttcagtgcccatatttcttcttcgacgtcgtgtacattcataatgggaccgaagagaaggaagaggagatgtcctggaaggacatgtttgcattcatggggtcactcgacacaaaaggcacttcttataaatatgaagtcgcactcgccggtcccgcattggagttgcataactgcatggcgaagctgttggcccatccgcttcagcgaccatgccagtcccacgcctcttactctctactggaggaggaggatgaggcaatcgaggtggaagccacagtctag

SEQ ID NO: 31761 - DNA, 1263 bp, synthetic construct
  source 1..1263: mol_type = other DNA; note = Synthetic coding sequence
atgctcagttcatttccagtggtcctcttggagactatgagccactacaccgatgagcctcggtttactatcgagcagatcgacctcttacaacgtctacgtcgtactggcatgacgaaacacgaaatcttgcacgctctcgagacacttgacaggctcgaccaggagcactctgacaagttcggacgcaggtcgagctatgggggttcctcatacggtaatagcacgaataacgtccccgcatcaagttcaactgcgaccgcaagcacccagacccagcacagcgggatgagcccgtcccctagtaattcttacgatacttcccctcagccttgtactacaaaccagaatggtagagagaacaatgaacgcttatccacgagcaacggtaaaatgtctcccactagataccatgccaatagtatgggacagaggtcctattcgtttgaggccagcgaagaggatctggatgtggatgacaaggtggaggaactgatgcgccgagacagtagcgtgattaaagaagagattaaagccttcctagcaaataggcggatctctcaggccgtggttgcacaagttaccgggatttctcaatcacggatatcacactggcttctacagcagggatctgatctctctgaacaaaaaaagagagcattttatagatggtaccagctcgaaaagaccaaccccggagccactctctccatgagacccgcacctattcccatcgaggaccctgagtggaggcaaacaccccctcccgtcagcgcgacgtccgggacattcagattacgcagagggagccgttttacttggcgcaaagagtgtctggcagtgatggagtcctactttaatgagaaccaatacccagatgaggctaagcgggaggagattgccaatgcctgcaacgccgtgatacagaagcccggaaaaaagctgtccgacttagagagggtcacatcccttaaggtttataattggttcgccaaccgcaggaaagaaatcaagagaagagcaaacatcgaagctgccatcctcgagtcccatggaattgatgtccagagccccggaggccattcaaatagtgacgacgtcgacggaaatgactactctgaacaggatgactctacaagccactctgatcaccaggatccgatcagccttgcggtggagatggccgctgtaaatcacaccatcctggccctcgctcgccagggtgccaacgagatcaaaacagaagcattggatgacgactag

SEQ ID NO: 31762 - DNA, 1263 bp, synthetic construct
  source 1..1263: mol_type = other DNA; note = Synthetic coding sequence
atgctctcaagtttccctgttgtgctcctcgaaacaatgagtcactacacagatgagccacgctttaccattgagcagattgacttgcttcagcgcctgaggcgcaccggtatgactaagcacgagatactgcacgctctcgagacgctggatcggcttgatcaggagcacagcgacaaattcggcagacgctctagttacggaggcagctcttacggtaattctactaacaatgtgcccgcatctagttcgacagctactgcatccacccagactcaacacagcggcatgagtcctagtccctcaaattcatacgatactagccctcagccttgcactacaaatcagaatggcagggaaaataacgaaaggctgtcgacaagtaatggcaagatgtctcccacccggtatcatgctaactctatgggtcagcgtagttacagtttcgaggcgagtgaagaagatttagacgtggacgataaagtcgaggagctgatgcgccgtgactccagcgttattaaagaggaaatcaaagcctttcttgccaatagacgcattagccaagccgttgtggcccaggtgaccgggatatcacagagccgcatttcacactggctgttacagcagggttccgatctgagcgaacagaagaagagagccttttaccgctggtatcagctagagaaaactaatccaggcgcaacattatctatgaggcctgcccctatccccatagaggacccggagtggcgccagaccccaccccctgtgagcgcgaccagcggcacttttcgattgaggcggggttctcgcttcacatggcgtaaagagtgcctggccgttatggaaagctattttaatgagaaccagtacccagatgaggctaagagagaggagatcgcaaatgcgtgtaacgcagttatacaaaagccaggcaaaaagctaagcgatctggaacgcgtcacttccctgaaagtctacaactggtttgcgaaccggaggaaagagattaaaaggcgcgcaaatatcgaggcagccatcctagagtctcacggcattgacgttcagtcacctggtggacacagtaatagcgatgatgttgatggaaacgactacagtgagcaggacgatagtacatcccactccgatcatcaggaccccatctccctcgcagtggaaatggcagccgtcaatcacaccattcttgccctcgcgaggcagggcgctaacgagatcaagaccgaagcgttggatgatgactag

SEQ ID NO: 31763 - DNA, 915 bp, synthetic construct
  source 1..915: mol_type = other DNA; note = Synthetic coding sequence
atgctgagctcgttcccagtcgtgcttttggagacaatgagtcattatacggacgagccgaggtttacgattgagcaaatcgatctgcttcagcgtctgcgtcggaccggcatgactaagcacgagattctccatgcgctcgagaccctggaccgcctcgatcaggagcatagtgataagttcgggagaagatcctcgtacggcggatccagctatgggaattctacaaataacgtgcccgcttcatcgagtactgcaaccgcgtctactcaaacccagcattccggtatgagcccaagcccctccaactcctacgatacgtcgcctcagccatgtaccacaaatcagaacggccgagagaataacgaacggctttcaacttcaaacggcaagatgtcaccaacaaggtaccatgccaacagcatgggccagaggagctattcgtttgaggccagcgaagaagacctggatgtcgatgataaagtggaggagctgatgcgacgggattcctccgtcataaaagaagagatcaaagcctttctcgccaacagacgcattagccaggctgtcgtggcccaagtgactggcatttcacagtctcgaatctctcattggcttttgcagcaaggttccgatctgagtgagcagaaaaagagagcattttaccgatggtaccagctagagaagactaacccgggagccactctgagtatgagacctgccccaatcccaatagaagaccccgagtggaggcagaccccacccccagtctcagctacttctgggacatttcggcttaggagagggtctagatttacttggcggaaagagtgcctggccgtgatggaacgcaatacctggtcgcccgagagaagaatggaagaaaacaaatggaaactgctcagcgccggttag

SEQ ID NO: 31764 - DNA, 1332 bp, synthetic construct
  source 1..1332: mol_type = other DNA; note = Synthetic coding sequence
atgctctcaagtttcccagttgtgcttttggaaactatgtctcactacactgatgaaccacgattcaccatagaacagattgatctgctccagagactgagacgcacaggtatgaccaagcacgaaattttgcacgcattggagacacttgaccgcctcgatcaagagcactctgataaatttggccgtcgctccagctatggtggctctagctatggcaattccacgaacaacgtacccgcatcatcaagtaccgcaactgccagcacccagacacaacattctggaatgagcccctccccctcaaactcttacgacacgagcccccagccatgtactaccaatcagaatggaagagaaaacaatgaacgcctctccaccagtaatggcaagatgtcccccactaggtaccatgcgaactcgatgggacagaggtcatactcattcgaagccagtgaagaagacctggacgtggatgataaggtggaggagttgatgagacgtgacagttcggtgatcaaagaggagattaaagcatttctggccaatcgacgaatttcccaggccgtcgtggcccaggtcaccggtatcagccagtcccgcatctcacactggctcctgcagcaaggaagcgatctcagcgaacagaagaagagggccttctaccgctggtaccaattagaaaagacgaaccctggagccaccctttctatgagacccgcacccatacctatagaagacccagagtggcgacagacaccccctccagtgtccgctacaagtgggacattcagactcagacggggtagccggtttacatggagaaaagaatgtttagcagtgatggagagctacttcaatgagaatcagtaccctgacgaagccaaacgggaagaaatcgctaacgcctgtaacgcagttatacaaaagcccggtaagaaattgtccgacctcgaacgcgttacatccctcaaagtgtataattggtttgcaaataggagaaaggagatcaaaagaagagccaacatagcggcaatcttggaaagccatgggatcgacgtccagtccccgggagggcactcaaattccgacgacgtggatggcaacgactatagcgaacaagatacatggcaggtgcgcaatggagaagaagaggaaggtaggagcagcgagggcggacgagaagccgaaaaagacgatagcacgtctcatagcgatcaccaggatcctataagcctggccgtggagatggctgccgtgaaccatacaattttagccctggcccgtcagggggcaaatgagataaagaccgaggcgttggatgatgattag

SEQ ID NO: 31765 - DNA, 357 bp, synthetic construct
  source 1..357: mol_type = other DNA; note = Synthetic coding sequence
atgctaagtagtttccccgttgtgctgctcgagacaatgagccattatacagacgagcccaggtttacgattgagcagatcgacttgttgcagcggctgagacgcactggaatgactaagcacgagatacttcatgcgctggagaccttggaccggctcgatcaggagcactccgacaagtttggccgtcgtagctcctacgggggttcaagttacggtaattctacaaacaacgtgcccgctagcagttcaactgctacggcaagcacacagactcagcacagcggaatgtctccaagtcccagcaattcttacgatacctctcctcagccgtgtacgacaaatcagaatggatag

SEQ ID NO: 31766 - DNA, 1332 bp, synthetic construct
  source 1..1332: mol_type = other DNA; note = Synthetic coding sequence
atgctctcaagttttcccgtcgtgcttctggagacgatgtctcattacaccgacgaacctcgattcaccatcgagcaaatcgacttactgcagcgcctccgacgcacaggtatgactaagcacgaaatcctccatgctttggaaactctggacagactggatcaggagcactccgacaagttcggaaggcgatcctcatatggcggatccagctacggtaattctacaaacaatgtcccggcaagctcttctaccgcgacggcctctacccagacccagcattcaggaatgtcaccttcaccttccaattcctatgacacttcaccccagccttgtacaacaaaccagaatgggcgtgagaataacgaacgcctctctacctcaaatggtaagatgagccccacccgatatcatgctaattccatgggtcagcgttcctactcatttgaagcctccgaagaagacctggacgtcgacgacaaggtcgaagagctgatgcgaagggatagctctgtcataaaagaagaaattaaggctttccttgcaaacagaagaatatcccaggccgtggtggcccaggtcacaggcatatcccagagccggatatcgcattggctcctccagcaaggctcggatttaagtgaacagaagaagcgcgctttttacaggtggtatcaattggaaaagaccaacccaggcgctaccctatcaatgcggccagcaccgatccctatcgaggatcccgaatggcgccaaaccccacctccagtttctgccacttctgggacttttcgcttacgccgtgggtccagattcacctggcggaaagaatgcttggctgttatggaatcctactttaacgaaaaccagtaccccgatgaagccaaacgggaggaaatcgctaacgcctgtaatgccgtcattcagaaacccggtaaaaaactgagcgacctcgagagggttacgagcctgaaggtctacaactggttcgccaaccgtcgcaaagaaatcaagcggcgtgcgaacattgcagctattctggagagtcacggaattgacgtgcagtctcctggtggccactctaactcggatgatgtggacggaaacgattacagtgaacaggatacctggcaggtgcgaaacggcgaagaagaggaaggccgaagtagtgaagggggacgtgaagctgaaaaggacgactctacctcccacagtgaccatcaggaccctatttcactggcagtggaaatggccgcagtcaaccatactattctggcactcgctagacagggagcaaacgaaatcaagacagaggcgctagatgatgactag

SEQ ID NO: 31767 - DNA, 1218 bp, synthetic construct
  source 1..1218: mol_type = other DNA; note = Synthetic coding sequence
atgctgagcagctttcctgtggttcttctcgagactatgtcccattatacagacgaacctagatttaccatcgaacaaatagatttgttacaaagactccggagaactggtatgactaagcacgaaatcttgcatgccctggagactcttgacagattggaccaagagcattctgacaaattcggacggaggtcctcctatggaggctcttcatacggcaactctaccaacaatgtgccagcatcgtcatccacagcaacagccagcactcaaacccagcacagcggcatgtcccccagccccagtaatagttacgatacgtccccacagccatgtaccaccaaccagaatgggagagagaacaatgagcgtttgtcaacaagtaatggaaagatgtcccccaccagataccatgcaaacagtatgggacaaaggtcgtacagcttcgaggcatctgaggaagatctggatgtcgacgataaggtcgaagagttaatgcgcagggactcaagtgtgatcaaggaggaaattaaagcttttctcgctaacagacggatcagccaagcagtagtcgcacaagttactggaatcagccaatcgaggattagccattggttgctgcagcaaggtagtgacctctctgaacagaaaaaacgcgctttctaccggtggtaccagcttgagaaaaccaaccccggtgccaccctgagcatgcgtcccgctccgattccaatcgaggatcccgaatggcgtcagacacctccgcctgtttcagccacctcgggtacttttaggctccgcaggggtagtagattcacgtggcgcaaggagtgtctggccgtaatggagtcttacttcaacgaaaatcagtacccagatgaagctaagagagaggaaatcgcaaatgcttgtaatgctgtgatccagaagcccggaaaaaagttgagcgatttggaaagagtcacatcactgaaagtctacaactggtttgcgaacagaagaaaggagatcaagcgacgagctaacattgctgccatcttagaatcacatggcattgacgtacagtcccccggtggtcactctaacagcgatgatgtggatggaaacgactacagcgaacaggacacgtggcaggtcagaaatggcgaggaggaggaagggagaagcagtgagggtgggcgagaggccgaaaaggtagaggaggaaagacggatatag

SEQ ID NO: 31768 - DNA, 1380 bp, synthetic construct
  source 1..1380: mol_type = other DNA; note = Synthetic coding sequence
atgacggcagaggagatgaaggccaccgagtcaggtgcccagagcgcgcccctgcccatggagggagtggatatcagccccaagcaggatgagggggtccttaaagtgatcaagagggagggtaccggaaccgaaatgcctatgattggagaccgggtgttcgtgcattatactgggtggctgctcgacgggactaaattcgatagttcactggatcgcaaggacaagttttccttcgacttagggaaaggagaagtgatcaaggcatgggacatcgctatcgctacgatgaaggtcggggaagtgtgtcatattacatgcaagccagaatatgcttatgggagcgccggttctccacccaaaattccccccaacgcaacattggtattcgaggtggagctgtttgagttcaaaggagaggatcttaccgaagaggaggatggtggcatcatcaggcggatacagacccgcggcgaggggtacgcaaaaccaaacgaaggcgcgatcgtggaagtggcactcgagggttactacaaagacaaactttttgatcaacgcgagctgagattcgagataggagagggagaaaatctagatctgccctatggccttgaaagggcaatacaacggatggagaagggcgaacacagtattgtctaccttaaaccatcctatgctttcgggtccgttggcaaggagaagtttcagataccccccaatgcggaactcaaatacgagctgcacttaaagtcttttgaaaaggccaaagagtcctgggaaatgaacagcgaggaaaaacttgaacaaagtaccatcgtgaaagagcgcggtacagtttacttcaaagaaggcaaatataagcaagcgctgctgcagtacaagaagatcgtgtcctggctcgagtacgagagcagtttttctaacgaagaggcccagaaagctcaggcactgcgactggctagtcatctcaacctggccatgtgccaccttaaattgcaagccttttccgctgcaatcgagtcatgtaacaaggcactagagcttgattccaacaacgaaaagggacttttccggcgcggggaagcgcacctcgctgtgaatgattttgaactcgcaagagcggacttccaaaaagtactacagctctatccgaacaacaaggctgcaaaaacacaactagcagtttgtcagcaacgtattagacgtcagctggcccgggaaaaaaaactgtatgcaaatatgtttgagagactcgcagaagaagagaataaagcgaaggcagaggcctcaagtggcgaccaccctacagacacagaaatgaaagaggaacaaaaaagcaacacagcaggatcacagtcacaagtagaaactgaggcctag

SEQ ID NO: 31769 - DNA, 477 bp, synthetic construct
  source 1..477: mol_type = other DNA; note = Synthetic coding sequence
atggaaccacctgagggcgcaggaactggggaaattgtaaaagaggcagaggtacctcaggccgcgttaggagtgccggctcagggcactggcgataatgggcacactccagttgaagaagaagttggcggaatccctgtcccagcccctggtttgcttcaggtcacggaaagacggcagccactctccagcgtctcttccctggaagtgcacttcgatctcctggaccttaccgaattgactgacatgagcgatcaggagcttgccgaagtgttcgccgactctgacgacgagaaccttaacacagagtctcctgctggccttcatcccctcccgagagccggttatctgcggtctcccagctggaccaggacaagggctgaacaaagccacgaaaaacagccactgggtgaccccgagagacaagctaccgtgcttgatacttttcttacagtcgagcgaccacaggaagattag

SEQ ID NO: 31770 - DNA, 954 bp, synthetic construct
  source 1..954: mol_type = other DNA; note = Synthetic coding sequence
atggcgtctgtgatccccgcctccaatagatctatgcgcagcgatagaaacacatatgtcggcaagcggtttgtgcatgtgaaaaacccctatttggatcttatggatgaagacattctgtaccacttagacctcggtaccaagacacataatctgcctgccatgtttggggatgtgaagtttgtgtgtgtgggtggctccccaaacagaatgaaagcatttgctctattcatgcacaaggaattagggttcgaggaggcagaagaggacattaaggacatatgcgcaggaaccgatagatactgcatgtataagaccgggcccgtactcgcgatctcccacgggatgggaatcccttcaatatcaatcatgctgcacgaattgattaaactcctgcaccacgccaggtgttgcgatgttacaataatcagaatcggcactagcggtggtatcggcatcgctccaggcactgtcgtcattactgatatcgcggtggactcttttttcaagcccaggtttgagcaagttatcctggataacatcgtcacgagatcaaccgagctggataaggaactctcagaagaactttttaattgtagcaaggagatccccaactttcctactttagtaggacatacaatgtgtacatatgatttctatgagggtcagggccgcttagacggtgcactttgctcgttttcccgcgagaaaaaattagactatctgaagcgtgcgttcaaggccggggtccggaacatcgagatggaaagcacagtctttgctgcgatgtgtggcttgtgtggactcaaggccgcagtcgtatgcgttactctactggaccgtttggactgcgatcaaattaatttgccccacgatgtgctggtggaataccagcagagaccccagctcttaatctctaactttatcagacgcaggctggggctatgtgactag

SEQ ID NO: 31771 - DNA, 1095 bp, synthetic construct
  source 1..1095: mol_type = other DNA; note = Synthetic coding sequence
atgtcggaggtagaggccgccgctggagccacagccgtgccagccgccacagtccctgccacggccgctggagtagtagcagtggtggttccggtccccgctggagagccccagaagggtggaggtgcaggcggcggcggcggagcagctagtggtccagctgccggaactcctagtgcacccggctcaagaactccaggtaacccagcaaccgcagtgtcaggcacccctgcacctcccgctcggagccaggctgacaagcccgtgttggcgatacaggtacttgggacagttaagtggttcaacgtgagaaacggctatggcttcattaatcgtaatgataccaaagaagacgtgtttgtccaccaaactgcgatcaaacgaaacaatcctcgtaagttcttaaggagtgtgggcgatggtgagactgttgagtttgacgtggtggagggggagaagggtgccgaggcaaccaacgtcacagggccagggggtgtcccggtaaaaggatcacgttacgcacctaatcgcagaaagagtaggagattcatcccccggccaccgtctgtggcacctccccctatggtggccgagatcccaagcgccggcacagggcccggtagtaagggagagcgcgcagaagattcgggccagagaccgaggagatggtgcccacctccattcttctacagaagaaggttcgttcgggggcctagaccaccaaaccagcagcagccaattgaaggaacagatcgtgtggagcctaaagagacagcacccctagagggacaccagcaacagggcgacgagcgggtgccaccacctagatttaggccgagataccgaagaccattcagacccagacctaggcagcagccgactacagagggaggtgacggcgagaccaagccctctcagggccccgctgatggttcccggcctgaaccgcagagacctcgcaaccgaccgtattttcagcggaggagacaacaggctcccggtccccagcaggcccctggcccacggcagccagccgcacctgaaaccagtgcccccgtcaactcaggcgacccaacgacaaccatcttagagtag

SEQ ID NO: 31772 - DNA, 5706 bp, synthetic construct
  source 1..5706: mol_type = other DNA; note = Synthetic coding sequence
atggccacctttaggaataatcatatgaagaccaaagcttctgtgagaaagtcattttcagaggacgtcttccagagtgtgaagtctctcttgcaaagccagaaggagctctgtagtgtgactgctgaagactgtctgcagcaggacgagcatgctaacctcaccgaagtgacattcctgggattcaatgaggagactgatgcagcccacatacaggatctggcagccgttagcctggagctcccggacatccttaattccctgcacttctgctccctcaacgaaaacgagatcatatgcatgaaaaacatcaacaagccgttagacatctcaagcgacccattaaatcagtcacatccgagtgggatgttgtgtgttatgagggtgagcccaacctcccccagactcagaattgatttcatctttagcctcctatccaaatacgccaccggaatccgctacaccctcgacacgtttttgcaccaaaaacaccaacttgaaacgacagacgaggatgacgacgacactaatcagagcgtctcatcaatagaagatgacttcgtgaccgcctttgagcacctggaggaggaggaaacgagtaaaccatataacgatgggatgaacatcacagtccttcggtcacagtgcgacgctgcatcccagacagtcacaggtcaccatctggagacccatgatctgaagattctgatcagctcaggccaacaaaagtcactggccaaaccgagcacttctagtgtaaacgtgctaggccataaggagctgccctcagttaagacaagcgtgactacctcaatctccgagccatggacccagcgctctttctaccggagttcgaacgcaagcgacaaggacagcgatctacagaagacattcttctcgtctagccctgcttactcatccgaatcggaatgttcttcacccagccccgttatctttctcgacgaagagggttaccagaaaagcctgaaagctaagcttgaactgcctaaaattccagtgatgaaagacgatatcgaggactcagactcagaggtctccgagttttttgattcttttgatcagtttgacgaactggagcagacattagagacctgcctctttaataaggacccagtcatagggaagtcgtctcagagaaaaggtcataaacacggaaagtcatgcatgaatccacaaaagttcaagttcgatcggccggcgctccctgctaacgttaggaaacctacaccacgaaagccggagtctccttacggaaatttgtgtgatgcgcccgatagcccaaggccagtgaaagcttcacgtgaagacagcgggctgtttagtcccattagaagcagcgctttcagccctctcgggggttgcacacctgctgaatgtttctgccagactgacatcgggggcgatcggattcacgaaaaccatgactcagtttactacacctacgaagactatgccaagtcaatctcatgcgaggtactggggagcgtcttgcggacccaccacacgaacacgctatctaatatcaactcaattaaacatggcgagaacaaaacggtgacctttaaacacggaaacctggaccagaagaataaaagtaagaacaaaagccttatgattaaggattccattcagaagttcgcggccgatctggtcgagaagagctttggctccgcattcaaagatctgcagaagggagtgagctcttgcactaatgctctgtaccacttggcgatcaagctgacctcaagcgttctgcagatggcttttgacgagttaagacgccaacgggccttctctctcaaggagagggctataagcggcctggctaattttcttgtctccgaggccctgtcaaacgcacttaaagacctgcagtacgtcaaaaagcagattttcacgaacacagttgcccggttcgccgctgatttggctgaagaacttgtatttgaagggatcatggaggtatgtcagttttcctacccccagactccagcttcaccccagtgcggcagttttgattttgaggacaaggttgttaagctttacgcaaaggacctttccgaaagtgttatccaggaagcctttattgagctgtcacaggtggatgttacttttaccacaaaggctgcggtctccgttagcactgataatatcaaatacgtaagcgcagagtcggtagtcccatcaacccaagccgttactttttcacccagctttcacaaccaagccatcatggtgacgaaaccagtccaggaatataagaaagagtacactgtgcagcaggcattgttctgcacatctggtatcgtcacgtctataccggtacctttggccggctccgcccttctaccctatcacatttcctccaccgcatgtcaggcgaaagctcatctcagtagcgacgatagtaatagcaacggtgactccgcacaagtccacatcgctacaaagaacagggaagagaaagctgcttgcctgcggaatatatgcctcccaagcgaacacaatccagggaaccagaacgacttcaagccaacaaacgatgacatcgaaatgcagtctagttctaaattaccaaacgatcccgcgatcatctcaaatttctctgcggcggttgtgcatacaattgtgaacgagaccctcgagtcaatgacatcacttgaggtaactaaaatggtggatgagagaaccgattacctcactaaaagtctaaaggaaaagactcccccattctcacattgtgatcaggcagtgctccagtgctcagaagcatcctccaacaaagacatgttcgctgataggctaagcaagtccatcatcaaacactctatcgacaaatcaaagtcagtgatccccaatattgataagaacgctgtctacaaagaaagcctacccgtcagtggagaggagtctcagctgacacccgaaaagagccctaaattccccgacagccaaaaccagctcacccattgttccctttccgccgctaaagattgcgtgcccgagtgtaaggtgtctatggtccacggttccagtttagagaccctcccaagctgccccgctgtgaccgggcagaagtccgatctcaaggaatctgctaaagaccagcctctgaaaaaacataatttgaacagcacgtctctcgaggcattgtcatttgggcaagagaatccattccctcactcacacacattttccagcacagcccttacctgcgtcgacggactccatgtagaagataagcaaaaagtgcgggaccgtaatgtgattcccgatacaccaccctccactcccctggtgccctctcgcgcatcgtctgagtgggatatcaaaaaattgactaagaaacttaaaggcgaactggcaaaggagtttgcccccgccacacctccctccaccccgcataattcaagcgtgggatccctgtcagagaacgagcagaacacaattgagaaagaagaatttatgctaaagctcatgcgaagcctttccgaagaggttgagagctccgaaagcggagagctgccagaagttgatgttaaaagcgagcactccggcaaaaaagtgcagtttgccgaggcattggcgacccacatcttgtccctggcaacggaaatggctgcctcgcacctggataataaaatcattcaggagcccaaggtgaaaaacccttgcctgaacgtgcagagccaaaggtcagtctcccccacattcctaaatcccagcgatgaaaacctgaaaactctctgtaacttcgccggggaccttgctgcagaagtgattaccgaggcagaaaaaattgccaaagttcgcaactgcatgctgtttaagcagaaaaaaaactcctgttatgcagacggagatgaagactacaaggtggaggagaaattagacattgaggcggttgttcaccctagggaagtggatccgtttatcttaagtctcccaccttctagttgtatgtcagggctgatgtacaagtacccctcatgtgagagcgtcacagatgagtatgccgggcatttaattcagatcctgaagcaggaggggggcaactccgagctcataatggaccagtatgctaacaggctagcctacagatcggttaaaagcggcctccaggaggccgcgaagaccactaaggtccaatgcaactcaagaatgttcccagtcccatcttcacaggtcaaaacaaataaggaacttctgatgtttagcaacaaagagcaccaccaggaggctgacaagaaaaggcagtccaagcgtaatgagggatatttttgtaaaaaccagacctgcgagaggaccctggatccatataggaatgaggtatcacagctctactccttcagcacttcacttgttcacagcatcacaaaagacgcaaaagaagaattaacggcatcccttgtgggtctgcctaaatctttgaccgactcttgtctgtttgaaaagtccggatacgaagaagacaacgagtgtcacgtgacaccggagctgcccaaatccctccagccatctagccagaaccatagattctatcactctaccggaagtctgaacggatacggatgtggcgacaacgtcgttcaagccgtggagcagtacgccaaaaaagtggtggacgacaccctcgagctgaccctagggagcacggtttttcgcgtcagtgaaaccaccaagtcagctgaccgcgtgacatatgccgagaagttgagcccacttaccggccaagcttgcaggtattgtgacttgaaggaattacacaattgtacgggaaactctagtcagcacttcttccggcaaggatctctggcctcatccaaacctgcctcaaacccgaagtttagtagtcggtaccagaagtctagaatttttcatctttctgtgcctcagatccacgtgaatctggataaaaaggccgtcctggctgagaaaatcgtggcagaggccatcgaaaaagccgaaagggagttgagcagcaccagcctcgctgctgatagcgggatcggacaggaaggcgcctccttcgccgaatctctcgcgacagaaaccatgaccgccgctgtgactaacgtcggccatgccgtgtcatcttcgaaggaaatcgaagatttccaatctactgaatctgtatcctcccagcagatgaatctgtccataggagatgacagcacagggagctggtcaaatctgagcttcgaggatgagcatcaagacgaatcatcctcttttcaccatctttccgagagcaatggaaatagcagcagctggtcttctctaggactagaaggggatctttacgaagacaacctgtccttccccacatcagatagtgatggacctgatgacaaggacgaagagcacgaagatgaggtcgagggcctaggccaagacgggaagacattactgattacgaacattgacatggaaccctgcaccgtcgacccccagctgcgcatcatcctccagtggctgatcgcttccgaggccgaagtggccgagctgtactttcacgattccgcaaacaaggagttcatgttgctatcaaaacagctccaggagaaagggtggaaagttggcgacctgctgcaagcagtgcttcagtactatgaagttatggagaaagcgtcatcagaggagcgttgcaaaagcctgttcgattggctgctcgagaatgcttag

SEQ ID NO: 31773 - DNA, 417 bp, synthetic construct
  source 1..417: mol_type = other DNA; note = Synthetic coding sequence
atggcggaactgcagcaactgagggtccaggaggccgtggaatccatggttaagagtttagaacgcgagaatatcagaaagatgcaggggctcatgttccggtgcagcgctagttgttgtgaggacagccaagccagcatgaagcaggtgcaccagtgtattgagcgatgccacgtgccacttgcccaggcccaggccctagtgacttcagagctcgaaaaatttcaagatcgattggctagatgcactatgcactgcaatgacaaagctaaggacagtatcgacgcaggttctaaagagctccaagtgaagcagcagctggactcttgtgtcactaagtgtgtcgatgaccatatgcatcttatcccaacaatgacaaagaaaatgaaggaggcccttttgtccatcggaaaatag

SEQ ID NO: 31774 - DNA, 1110 bp, synthetic construct
  source 1..1110: mol_type = other DNA; note = Synthetic coding sequence
atgaccttggaagcaatccgatacagtcgcggaagccttcaaatcctcgatcagttattactacctaagcaatcaagatatgaagcagtggggagtgtgcatcaggcctgggaggccattagggcaatgaaggtgaggggagcacctgccatagcactcgtcggatgtctttcactcgccgtggagctgcaggccggggcaggcggaccggggctggctgcgcttgtagctttcgtgagagataagctctctttcctagtgacagcccgacctacagctgtaaatatggcgagagctgctcgggacctggctgatgtagccgccagagaagcggagagggagggggccaccgaggaggctgttagggagcgggtgatatgctgcacggaagacatgttggaaaaggacttgagggacaatcggagtatcggagacttgggcgctaggcatctgctagaacgagtggcaccatccggcgggaaagtgacagtgctgacacactgtaacacaggggcactggccaccgcgggatatgggacggcactgggagtgatcaggagcctccattccctgggacggctcgagcacgctttttgcaccgaaactcgtccatataatcagggagcaagactaactgccttcgaacttgtatatgagcaaatcccagctaccctgatcacggattccatggtcgcagctgctatggcacatcggggggtgtcagctgttgtggtgggagcggacagagtggtggctaacggtgacaccgccaacaaagtcggcacttatcagctggccatcgtagccaaacaccacggcattccattttacgtggccgccccttccagctcttgtgacctgcgcctagaaactggcaaggagatcataatcgaagaacggcccgggcaggagttaacagacgtgaacggtgtgcgcatcgccgcccccggaatcggagtctggaacccagcctttgacgtgactcctcatgatcttatcactggcgggatcatcactgagctgggcgtctttgctccagaggaacttcgcaccgcactgacaaccactatctctagtagagacgggactctcgacggtcctcaaatgtag

SEQ ID NO: 31775 - DNA, 3660 bp, synthetic construct
  source 1..3660: mol_type = other DNA; note = Synthetic coding sequence
atgatgagtctaagcgttaggccccagcgccggctcttgtcagcacgagtcaatcgtagccaatctttcgctggagtcttaggctctcatgagcggggtccaagaagctttcccgtcttcagcccccctgggcctccaagaaagccacctgccctttcccgggtgtcaaggatgttctccgtggcccatcctgctgcgaaagtgccacagccagaaaggttggatctcgtctatacggccctgaagcggggactcaccgcatacttagaagtccaccaacaggagcaggagaagctccagggccagatccgcgagagtaagagaaacagccgactggggttcctgtatgatctggataagcaggtcaagagcatagaacggttcctccgccgtctggaattccatgcgagcaaaattgacgaactctacgaagcttactgcgtgcagaggaggcttcgggacggggcctataacatggtgagagcctatacaaccggctctccgggttctagggaagccagagacagtctggctgaagccactagagggcatcgcgaatatacggaaagtatgtgtcttcttgagtcggagcttgaagcacagctgggcgaatttcacttaagaatgaagggtctggctggctttgcacgtctctgtgtgggagaccaatacgaaatatgtatgaaatacggtaggcagcggtggaaactacggggtaggatcgaaggcagcggcaaacaagtgtgggactctgaagaaactatcttcctacccctacttacggaatttctctctattaaggtgaccgaactgaaaggcctggcaaaccacgttgtggtaggcagtgtgagctgtgagaccaaggacttattcgctgccctgccacaggtcgtagctgttgatatcaatgatctcgggacaatcaaactcagcctggaagtaacatggtcaccattcgataaggacgatcagccaagtgctgcaagctctgtaaacaaggcctccactgtgacaaaaaggttctcaacctactcccagtctcctcctgacacccccagcctgagggaacaggcattttataacatgctcaggcggcaagaggaactagagaatggcaccgcttggtcattgtccagcgaatcatctgatgattcctcctcaccccagctgtctggaacagcacgtcactcaccagccccccggccactggttcagcagcccgagcctctgcctatacaggtggcctttcgccgcccggagactccatccagtggcccactagacgaagaaggagctgttgctcccgtgctggccaatggacacgctccctactcacggacgctgtcccacatctcagaagcctcagtcgatgccgcattggcagaagcgtcagttgaagccgtcggccctgagtcacttgcatggggcccctcacctcccacacaccctgccccgacacatggagaacatcccagccctgtgccaccagcccttgatcctggtcattccgcaacatcttctactctgggaaccaccggcagcgtgccaactagcactgaccctgccccgagcgctcacctcgactctgtacacaagagtaccgattctggtccaagcgaattacccgggcctactcataccactacgggcagcacttattccgcaataacaactacacacagtgctccgtcacctctgactcatactacaacaggaagtactcacaagccaataataagcaccctgacaacgaccggacccactttgaacattattggtccagtgcagacaactacctcacctacgcataccatgcctagtccaacacacaccaccgcatccccgacacatacaagtaccagcccaactcacaccccgacctcacctacacataaaaccagcatgagccctccgaccacaacttcccctacgccatcaggcatgggtctcgtgcaaactgctacctccccaacacatccaaccacaagtccaactcacccaactacatctcctatcctcataaacgtgtcaccctccactagcttggagctcgccaccttgagctcacctagtaagcattccgacccaacactgcccgggacagattcactgccctgttcccctccagtctcaaacagctatacacaggctgatcctatggcacctaggactccacacccatcgcccgcccactcgagccgtaagcccctcacgagccctgcccctgacccctccgagtccactgtccagtccctttcccccactcctagtccgccaacgcctgccccccagcacagcgatttatgcttggccatggctgttcagacaccagttccaacagctgccggcggtagtggcgacaggtctcttgaggaagccctgggagccttaatggcagccctggatgattaccgcgggcagtttcctgagttgcaaggccttgaacaagaggtgacaagactggaatcactgctgatgcagagacagggtctcacccgttcccgggcgtcctcactgagtatcaccgtagagcatgcattggagtcatttagttttttgaatgaggacgaagacgaagacaatgacgtgcctggggatagacccccctccagccccgaggccggcgccgaagactcaattgatagcccatccgctcgacccttaagtacagggtgcccagcgctggatgctgcccttgtgaggcacttgtatcactgttctagactgcttctaaagcttgggaccttcgggccccttagatgccaggaagcctgggccttggagcgactcctccgagaagcacgcgtgctggaagcagtctgcgaattttcaaggagatgggaaatacccgcctcctcagcccaggaggtcgttcaatttagcgccagtcgacctgggttcctcaccttttgggatcaatgtaccgagcggctctcttgcttcctgtgtccagtcgaacgcgtgctcctgaccttttgcaaccaatatggagcgcgtctgtcactcagacagcccggcctggcagaagccgtttgtgtcaagttcctggaggatgccctcggccagaagttaccccgccggccccagcctggccctggagaacagctgacagtgttccagttctggagcttcgtcgaaactcttgattcacctaccatggaggcatacgtgacagaaactgccgaggaagtcctgctggtgcgcaacctcaattcagacgaccaggctgttgtgctcaaggccctaaggttagcgcctgagggaagactgaggagagatggactgcgcgcgctgagcagccttctcgtacacggaaataataaagtgatggctgcggtcagtacacagttacgatcactgtccctcggccccacgtttcgagaacgcgctctgctttgcttcctggaccaactcgaggacgaagacgtgcagacccgcgtcgcgggatgtttggccctcggctgtatcaaagcaccagaaggaattgagccactcgtgtacctttgtcagacggacacagaggctgtaagggaagccgctaggcaatcactacagcagtgtggcgaggagggccagagcgcccatcggcggctggaggagtccttagatgccctccctcgcatctttggtcccgggtccatggcatccacagcattttag

SEQ ID NO: 31776 - DNA, 1326 bp, synthetic construct
  source 1..1326: mol_type = other DNA; note = Synthetic coding sequence
atggcaagcgtcgcggccgcccgcgcagtcccagtcggaagtggcttgagagggctccagcgaaccctgcctttagtggtcattctgggagctaccggaacaggaaagtccactctggctctgcagttgggccaacgactgggaggagaaattgtaagtgccgattcgatgcaagtgtatgagggactagacatcataacaaacaaggtaagcgcccaggagcaaaggatttgtcggcatcacatgattagtttcgtggacccattagtgactaactacactgtggtagattttagaaatagggctaccgccctcatagaagacatttttgccagagacaaaatcccgatcgtcgtagggggaaccaactactacattgaaagcctcctgtggaaagtgcttgttaacacaaaaccccaggaaatgggtaccgagaaagtgatcgaccggaaggtagagctcgaaaaagaagacggcttagtgctgcacaaaaggttgtcacaagtagaccctgaaatggccgccaagctacatcctcacgacaagagaaaggttgcaagatcactgcaggtgtttgaagagaccgggataagtcactcagaattcctccatagacaacacactgaggagggtgggggccctcttggaggacctctgaagttcagcaatccatgcatcttatggctccacgctgaccaagccgtcctcgacgagcgactggataaacgggttgacgatatgctggctgccggactgctggaagaattacgggacttccatagacggtacaatcagaagaacgtcagtgaaaatagccaggattaccaacatggaatatttcagtcaattggatttaaagagttccatgagtatctgatcactgaagggaagtgcaccttggagacctccaatcagctgctcaagaaaggccctgggcccattgttcctcccgtgtatggcctcgaagtatcagacgtaagcaaatgggaagagtctgtcctcgaaccagccctggaaattgttcaatctttcatccagggccataagcccacagccacccccattaaaatgccctataatgaggctgagaacaagcgcagctaccatctttgtgatttgtgtgatcgcattatcatcggcgatcgcgaatgggctgcacacatcaaaagcaagtctcacctcaaccaactgaagaagcggcgaagacttgactctgacgccgtgaatacaattgaatcgcagagcgtaagtcccgatcataataaggaaccaaaggagaagggtagccccggccaaaatgatcaggagttgaaatgttccgtgtag

SEQ ID NO: 31777 - DNA, 618 bp, synthetic construct
  source 1..618: mol_type = other DNA; note = Synthetic coding sequence
atggccgagccacttcagccggatcccggtgctgcggaggacgcagccgcccaggccgtcgagacacctggctggaaagccccggaagatgcaggacctcaaccaggctcatacgagattcgccactacggcccagccaaatgggtaagcacatcagtcgagtcaatggactgggatagcgcaattcaaaccggatttacaaagttaaactcatacatacaggggaaaaatgaaaaagagatgaaaataaagatgacagctcccgtgacatcttacgtagagcccggcagcgggccctttagcgagtccactattacaatcagcctttatattcccagcgagcagcaattcgacccgcctaggcctctagagagcgacgtgtttattgaagacagggcagagatgacagtctttgtgagaagttttgacggtttcagtagcgcacaaaaaaaccaggaacaattactcacacttgcatctatcctgagagaggatggcaaggtctttgatgagaaggtatattatacggccggatataattcgccagtgaaattactgaacagaaataacgaggtctggttaatacaaaagaatgagccaaccaaagaaaacgagtag

SEQ ID NO: 31778 - DNA, 624 bp, synthetic construct
  source 1..624: mol_type = other DNA; note = Synthetic coding sequence
atgtcttgtaccattgaaaaaatcctgaccgacgccaagaccctgctggaaaggctgagagaacatgacgcagctgccgagagtttggttgatcagtcagcagcactgcaccgcagagtggcggcgatgagagaagccggaactgccttacctgatcagtatcaggaagacgcaagcgatatgaaagacatgtccaagtataagccacacatattattgagccaggaaaacacccaaatccgagacctccagcaagaaaatcgggaactttggatttctctcgaagagcatcaggatgccctcgaattgattatgtctaaataccggaaacagatgttgcaactgatggtcgctaaaaaagccgtagacgctgaacccgttctaaaggcacaccaatcccacagcgcagagatagaatcccaaatagaccgaatctgtgaaatgggcgaggtaatgagaaaggccgtgcaagtggacgatgatcaattttgcaagatccaagagaaattagcgcagctggagctggaaaataaggaactgagagagttgttgagtattagctccgaaagcctgcaagctaggaaagaaaactctatggacactgcaagtcaggcgatcaaatag

SEQ ID NO: 31779 - DNA, 1032 bp, synthetic construct
  source 1..1032: mol_type = other DNA; note = Synthetic coding sequence
atgaatatacaccgtagcaccccaatcactatcgctcggtacggtcgaagtcggaacaagacccaggatttcgaagaactatcaagtatcagaagcgctgaacctagccagtcattttccccgaacctcggatcaccttcacccccagagacaccgaacctgagccattgtgtgagttgcattggtaaatacctgctgttagaacctctggagggagatcacgtgtttcgtgcagtgcatctgcacagcggggaggagcttgtatgtaaggtcttcgacatctcgtgctaccaggaaagtctagccccctgcttctgtctgagcgcccattctaatatcaaccagattacagagataattcttggtgaaactaaagcatatgtctttttcgaacgttcctacggggacatgcactcatttgtccgcacatgtaaaaaactccgggaggaagaagctgcgcgactcttttatcaaattgcttccgccgtagcgcactgccacgacggtgggcttgttctacgtgatctgaagctgagaaagttcatctttaaagacgaggagagaacacgagtgaagctagagtcacttgaggatgcttatattttgagaggagacgacgactccttgtctgataaacacggttgccctgcatatgtttcaccggagattctgaacacctcgggcagctattccggcaaagctgcggacgtatggtctcttggagttatgctttataccatgctggtaggccggtacccttttcatgacattgagccctcctcgctgttttccaaaatccgacgagggcagttcaacatcccagagacactttctcctaaagctaaatgtctgattaggtctatcctgaggcgcgagccttccgagaggttaacatcacaggagattctggatcatccttggttcagcacggatttcagtgtatccaactcagcctatggcgcaaaagaagtgtccgaccagttggtgcccgacgttaatatggaagagaatttagacccatttttcaattag

SEQ ID NO: 31780 - DNA, 3048 bp, synthetic construct
  source 1..3048: mol_type = other DNA; note = Synthetic coding sequence
atgcgacgctttttaaggccgggccacgatccggtgcgggagcgcttgaagagagacttgtttcaatttaacaagacagtagaacacggtttccctcatcagcccagcgctctaggctatagcccctcgctgcggatcctcgccatcgggacccgcagtggagcaattaagttatatggagcaccaggcgtggagtttatgggattacatcaggaaaacaatgccgtcactcaaatccacctcctccccgggcagtgtcagctcgtcaccctgctggacgacaatagcttgcatctctggtctctaaaggtgaagggaggcgctagcgagctgcaagaggacgagtctttcaccttgaggggacctcccggcgcagctccatctgcgacacaaataaccgttgtgttgccgcatagttcctgtgaactgctgtatctcgggaccgagagcggcaacgtttttgtggtccaacttccagcatttcgcgcccttgaggatagaacgatttcatccgatgctgtgctgcaacgcctgcctgaggaagcaaggcatcgtagagtttttgaaatggttgaagctctccaggaacatcctcgcgatcccaatcaaatcttgatagggtactcaaggggactcgtggtcatttgggacttgcaggggtctagggtcctgtatcactttctctcttctcagcagctggagaatatctggtggcagcgcgatgggcggctcctggtgagctgtcactcagatggctcttattgtcagtggcccgtgtcttcagaggctcagcagccagagcctcttcggtcattggttccttacggcccattcccttgcaaagcgattacaagaatcctttggctcaccacacgccagggtctgccctttacaatttttcagggtggcatgcccagagccagttacggcgacaggcattgtatcagcgtgatccatgacggccagcaaacagctttcgactttaccagccgcgtaatcggcttcacagtgttaactgaagctgaccccgctgcaacctttgacgacccctatgcactcgtagttctggccgaagaggagctggtggtcattgacctccagaccgctggctggcctccagtgcaactgccatacctcgccagcctgcactgcagtgccattacctgctcacaccatgtctccaacatccctcttaagctctgggaacgaatcatcgccgccggctcaaggcaaaatgcccatttctccaccatggaatggcccattgacgggggaacctcgcttactcctgctccaccgcagcgcgatcttctccttactggacacgaggatgggacagtccgattttgggatgcctcaggcgtctgcctccgcttgttgtataagctgtcaactgtgagagtgttcttgactgataccgatcctaatgaaaacttcagcgctcagggcgaagacgagtggccgccattgaggaaggtcggatctttcgacccctactcagatgatcctagactcgggatccagaagatcttcttgtgtaaatactctggttatctcgcagtggcagggaccgcaggccaggtgcttgtgcttgagctgaatgacgaagctgctgaacaggctgtggaacaggtagaggctgaccttctgcaggatcaagaagggtacagatggaaggggcacgaaagactggcagcccgctctgggccagtgcgatttgagccaggattccaaccttttgtgctcgtgcagtgccagccccccgccgtagttaccagcttagctttacattccgaatggcgactggttgccttcggtacctcccatggatttggactgttcgaccaccaacaacgacgccaggttttcgtgaaatgcaccctccacccttcagatcagttagctcttgaaggtccactgagcagagtcaaatccctgaaaaaaagcttgagacaatcgttccgacggatgcgcagaagcagggtatcaagccgtaagagacatcctgccgggccgccaggtgaagcccaggagggtagcgccaaagcagagcggcctgggctccagaacatggaacttgccccagtgcagagaaaaatcgaggccagaagcgcagaagatagcttcaccggattcgtgcggaccctgtatttcgccgatacctatcttaaagattcaagtcgacattgtccctctctttgggctggcactaacggcgggaccatatacgcattctccctgagggttcctcccgcagaacggagaatggatgaacctgtgcgggcagagcaagccaaggaaatccagctcatgcatcgggcgcccgttgtcggcatcctggtcctcgacgggcactcggtcccccttccagagcccctggaagtggcgcacgacctttccaagtcccccgacatgcaagggagtcaccagctgctcgttgtctcggaggagcagtttaaagttttcactttgcccaaggtaagtgccaaacttaagctgaagctcaccgccctggaaggcagtcgcgtccgaagagtgtccgtcgcccacttcgggtctaggcgcgcagaagattacggggagcatcatcttgccgtgctgaccaacctgggcgacattcaggtggtgagcctgccacttctcaaaccacaagttcgctactcatgtatacgcagggaagacgtgtcaggcatcgcgtcctgtgtgtttactaaatacgggcagggattctatcttattagtccatctgagtttgagagatttagccttagcacaaaatggttggttgaaccccgatgcctcgtcgattcagctgaaacgaagaaccacagacccggaaacggtgcaggccccaagaaggccccctcacgggctcggaacagcggcacccagtctgacggcgaggagaaacagcccggactcgttatggagagggcattgctcagcgatgagcgcgccgctaccggcgtgcatatcgaaccaccgtggggtgcggccagcgccatggccgagcagtcggagtggctgtcagttcaggctgcccgctag

SEQ ID NO: 31781 - DNA, 582 bp, synthetic construct
  source 1..582: mol_type = other DNA; note = Synthetic coding sequence
atgctcggagtgcttgagctattgctcctcggtgcagcctggctggcaggcccagcaaggggacagaacgaaactgaaccaatagtcctggagggaaagtgcctagtggtgtgcgattccaatccaacctcagacccaacgggcactgctcttggaatctcagtgaggtcagggtctgcaaaggttgcattttcagcgatccggtcaaccaaccatgagccctcagaaatgtcaaaccggacaatgatcatatactttgaccaggttctggtgaatattgggaacaatttcgacagcgaaagatccacgtttattgctccaagaaaaggtatttacagcttcaatttccacgttgttaaggtgtacaataggcaaactattcaagtaagcctgatgctgaatggatggcccgtgatttccgcgtttgccggtgatcaggacgtgacgagagaggctgccagcaacggcgtactcatacaaatggaaaaaggggaccgggcttacctgaaattggaacgcggcaacctgatgggggggtggaaatactcaacgttcagcggattcctggtattcccactgtag

SEQ ID NO: 31782 - DNA, 1530 bp, synthetic construct
  source 1..1530: mol_type = other DNA; note = Synthetic coding sequence
atgggggttctaaagttcaagcacatcttctttcgcagttttgttaagagctctggggtctcccagatcgtcttcaccttcctactcatcccttgctgcctgactttgaacttcagagcaccaccagtcatcccaaatgtgccattcctgtgggcttggaacgccccatctgaattctgtctgggaaagttcgacgaaccgctggatatgagcctgttctccttcatcggatccccccgaatcaatgctacgggtcagggcgttaccatcttttacgtagaccggcttgggtactacccatatattgactctattacaggcgtaactgtcaacggtggaattcctcagaaaatctccctgcaggaccatctggacaaggcgaaaaaggacatcacattctacatgccagtggacaacctgggtatggcagtaattgattgggaggagtggcgacccacttgggcgcggaattggaagccaaaggatgtatataagaaccgaagtattgagctagtacagcagcagaatgtgcagttgagtctgacagaagccacggagaaagcaaaacaggagttcgaaaaggctggcaaggattttcttgtagagacgatcaaactgggcaagctcctcaggcctaaccacttatggggttattacctcttccctgactgctacaaccatcactataagaagcccgggtacaacggatcttgctttaacgtggaaattaagcgaaacgacgatttaagctggctatggaacgagagcaccgccttataccctagtatatatctaaatacacaacagtcccccgttgccgccacactgtacgttaggaatagggttagggaagctattcgggtttcaaaaataccagacgctaaatcacctctgccggttttcgcttacacccggatcgtctttactgatcaggtgttgaagttcctcagccaggacgaactggtgtatacattcggagagacagtggccctcggggcatcaggcatcgtgatctggggcaccctgtccattatgcgatcaatgaagtcctgcctgcttctcgataattacatggagaccattcttaatccatacatcataaatgtgaccctggctgctaaaatgtgcagtcaagtgctatgtcaagagcagggcgtttgcatccgtaaaaactggaactcgtccgattacctgcatctcaatcctgataactttgccattcagctggaaaaaggcggaaaatttactgtcaggggtaagcccactctggaggatttagagcagttttctgagaagttctactgtagctgttacagcactcttagttgcaaggaaaaggctgatgttaaagacacagatgccgtcgacgtctgcatcgcagacggagtgtgcattgacgccttcctgaagccacctatggaaactgaagaaccacagatcttttataatgccagccctagcactctgtcagctacaatgtttatcgtgagtattctctttttgattatctcttcagtagcatccctctag

SEQ ID NO: 31783 - DNA, 1437 bp, synthetic construct
  source 1..1437: mol_type = other DNA; note = Synthetic coding sequence
atggctcatgtccccgcgagaacctctccaggtcctgggccccaactgctcctgctgctactccctctgtttctgctgctcttgagagacgttgccggaagccacagagctcccgcctggtcggccctgcccgcagccgccgatggccttcagggcgatagagacctgcagcgccaccccggagatgcagcggcaaccctgggaccctcagcccaagatatggttgcagtgcacatgcacagattatacgagaagtattcacgtcagggcgcccgcccagggggtgggaacaccgtaagaagttttcgcgcgcgattggaggtcgttgaccagaaggccgtctactttttcaacctcacctcgatgcaggactcagagatgatattgacagctacttttcatttttactcggaaccacctaggtggccacgcgcgctcgaagtcttgtgcaagccacgtgccaaaaacgccagcgggagacccctgccacttggaccacctactaggcagcatctgctgttcagatccctctcacagaacaccgcaacacagggcttgttgcgcggcgccatggcactggcaccgcccccaagaggcctctggcaggcaaaggacattagtcccatagtaaaggcagcaaggcgggacggcgaactcctgctgagcgcccaactggactcagaagagcgagacccgggagtccctaggcccagcccatacgcaccgtatattttagtttacgccaatgacctggctatttccgaaccaaactcagttgcagtcacgcttcagaggtatgatcccttcccggcgggtgacccagaacctagagcggcccctaacaattcagcagacccgcgggtgcggcgtgcggctcaggcaacaggtccgctgcaggacaacgaactacccggtctcgacgaaagaccacctcgggcccacgctcagcactttcacaagcaccagttatggccttcaccttttcgcgctcttaagcctcgacctgggcggaaggacagaaggaaaaagggacaggaagtgtttatggccgccagtcaggtcctggacttcgacgaaaagactatgcagaaggcaaggaggaaacagtgggatgaaccgcgcgtatgctctcggaggtaccttaaggttgactttgccgatataggctggaacgaatggatcatttctccaaaatctttcgacgcctattattgtgctggggcttgcgagttcccgatgccaaaaattgtgagaccatcgaatcatgcaacaattcagtctatagtgagagcggtcggcattatccctggcatccctgagccctgctgtgtgcctgacaagatgaactcactgggcgtgctgtttctggatgagaatagaaatgttgttctgaaagtgtacccgaacatgagcgtcgacacttgtgcatgccggtag

SEQ ID NO: 31784 - DNA, 1941 bp, synthetic construct
  source 1..1941: mol_type = other DNA; note = Synthetic coding sequence
atgtcaaagggcccagcagtgggcattgatttaggaaccacatatagctgcgtcggggtttttcagcacgggaaggtggagattattgcaaacgatcagggcaatcggaccacgcccagctatgtggcctttactgacacagaaagactaataggagacgccgccaaaaatcaagtggccatgaacccaacgaacacagtgtttgacgccaagagactgataggccggaggttcgacgatgcagttgtgcagagcgacatgaagcattggcccttcatggtggtaaatgatgccggacgcccgaaggttcaggtcgagtacaaaggcgaaactaagtctttttacccggaggaggtaagctctatggtgctgacgaaaatgaaggaaatagcagaggcgtacctagggaagacagtgacaaatgccgtggtaaccgtgccagcttacttcaacgattcacaacgacaagccacgaaggacgccggaaccattgctggccttaacgtcttacgcattatcaacgagcccacagccgcagctattgcgtacgggttagacaaaaaagtcggagcagagcggaatgtgttaattttcgaccttggcggagggactttcgatgtgagtattttgacaatagaggatggaatcttcgaagtgaagagcacagccggcgacactcatctgggcggagaggattttgataatcgcatggtgaatcactttatagccgagtttaagaggaagcataagaaagacatcagtgaaaacaagcgggccgtccggcgccttcgaacagcatgcgaacgcgcaaagcggacactgagcagttctacccaggctagcattgagatcgattccctgtatgagggtatagatttttacacttccataacccgggcgaggttcgaagaactcaacgccgatttgtttcgtggcactttggacccagtagaaaaagctctccgcgacgcgaagctggataaaagtcagatccatgatattgtgctcgtgggcggctccactcgcatccccaagattcagaagctcctccaggacttcttcaatggaaaagagctgaacaaatctatcaatcccgacgaagccgtggcctatggagcagccgtgcaagccgctatcctgtcaggcgataagagcgaaaatgtccaggatctgctgctcctggatgtcacacccctgagcctgggcatagagactgccggcggagtgatgaccgtgctgatcaaaaggaacacgactattcccaccaagcagacccagaccttcactacgtatagcgataatcagcctggagtgcttattcaggtctacgagggtgagagagcgatgacaaaagacaataacctgttgggcaaattcgagttaacaggcatacctccggcgccaagaggggtgcctcagatagaggtcacttttgatatagacgccaatgggatattaaatgtgagtgcggtggataagtcaaccggcaaagagaataaaattacgataacaaacgacaaaggccgtctgagtaaggaggacattgagcgaatggtgcaagaagccgagaaatacaaagctgaagacgagaagcagagagacaaagttagcagcaaaaattcactcgagagctacgcattcaacatgaaagcgaccgtggaggacgaaaagctgcagggcaaaataaatgatgaggataaacagaaaatattggacaaatgtaacgaaatcattaactggttagataagaaccaaaccgcagagaaggaagagttcgagcaccagcaaaaggagctggaaaaagtttgtaatcctattattactaagctgtaccaatctgccggcggtatgccgggcggcatgccaggagggtttccaggaggaggggcccctccttccggaggcgccagttctggacctactatagaggaggtggattag

SEQ ID NO: 31785 - DNA, 1632 bp, synthetic construct
  source 1..1632: mol_type = other DNA; note = Synthetic coding sequence
atgagaaaacctgccgccggctttctgcctagtctgctcaaggttctgttactgcctttagcaccagccgctgcacaagactctacacaggcgtccacacccggaagccccctgtccccaaccgaatatgaaagattcttcgcattgctgacaccaacctggaaagcggaaaccacctgccgattgcgagccactcatgggtgccgcaacccaacactggttcagctggaccagtacgaaaatcatggactagtgcctgacggggcagtctgcagtaacctcccttacgcctcttggtttgagtccttctgccagtttactcattatcgctgtagtaaccacgtgtattacgcaaagcgggtcttgtgtagccagcctgtgtctatactatcccctaataccctcaaagagatcgaggcttctgccgaagtgtcacccactacaatgacatcacctattagtccgcattttaccgttaccgagcgccagacattccagccctggccagaacggctgagtaacaatgtggaggaattgctgcagtcctcactctcgttaggcgggcaagagcaggcccctgaacacaaacaggagcaaggagtggaacacagacaggagccaactcaggagcacaaacaagaggaggggcagaaacaagaggaacaggaggaggaacaagaggaggaaggtaagcaagaggagggtcaaggaacaaaagagggccgggaagctgtaagtcagctgcaaaccgacagcgagcctaagttccatagcgagtcactgtctagtaatccatcatcttttgccccaagagtgcgcgaggtggagtccacaccaatgatcatggagaacatacaggaactgattcgtagcgcccaggaaatcgatgaaatgaacgaaatatatgacgagaactcttactggaggaatcagaacccaggatcactgctccaactcccgcacaccgaggctctgttagtgctttgctactctatcgtcgagaatacctgcatcatcacaccaactgctaaggcatggaagtacatggaagaagagatacttggttttgggaaatccgtgtgcgattcacttggcaggcggcacatgtccacatgcgccctctgtgatttttgttctcttaaattagagcagtgccattcagaggcctccctgcagcggcaacagtgtgacacctctcataagacacccttcgtttccccgctgctggcgtcccagagcctgagcattggcaatcaggttggctcccctgaatcaggtagattttatggcttggatctctacggcggactgcatatggatttttggtgcgccagactggctaccaaaggctgcgaagacgtgagagtgtctggctggctccagaccgaatttctctctttccaggacggtgatttccccacgaagatatgtgacacggattatatccagtaccctaactattgtagcttcaaaagtcagcagtgtctgatgcggaatcgcaataggaaggtgagcaggatgcggtgccttcagaacgagacttattctgccctgtctcccggcaaatcagaggacgtcgtcttacggtggagccaggaattcagtaccctgaccctggggcagtttggttag

SEQ ID NO: 31786 - DNA, 2349 bp, synthetic construct
  source 1..2349: mol_type = other DNA; note = Synthetic coding sequence
atggccccatccgcttgggctatctgctggttgctggggggactgctccttcacggtggaagctcaggaccctcccccggcccaagcgtcccacgactcagactgtcctaccgggatctcctgtccgccaaccggagtgctatattcctgggaccacagggcagcctaaacttacaggctatgtacttggacgagtaccgcgatagattattcctcgggggattggacgcattgtattccctcaggctggaccaggcttggcctgatcccagagaggttctttggcctcctcagcctgggcaacgcgaagagtgcgttcgcaaagggcgtgatcccctgacagagtgcgcaaattttgttagagtgcttcagcctcataatagaacccatttgctcgcatgtgggactggagccttccagccaacctgtgctctgatcacagtgggccaccgaggagaacacgtgctgcatctcgaacccgggagcgtggagtccggcagaggtcgatgtcctcacgagcctagtagaccatttgccagtacttttatcgacggcgaattgtacaccgggctcacagctgatttcctgggacgggaagccatgatattccgctccggggggcctcgcccagccttacgatccgatagcgatcagtcccttcttcatgaccctcgtttcgttatggctgcccggattcctgaaaattccgaccaggataatgataaagtgtatttctttttctccgagacagtgccttccccggatggcggatctaatcacgttaccgtgtcacgggtcggcagagtgtgtgtgaacgatgcaggagggcaacgcgttcttgtaaacaaatggtcaacattcctgaaagcaaggctggtctgttcagtgccgggacctggaggtgcagagactcactttgaccagttggaagacgttttcctcttgtggccaaaggccggcaagtcactggaggtgtacgccctcttttcaaccgtaagcgctgtgtttcagggcttcgccgtgtgcgtttaccacatggcagacatctgggaagtgtttaatggaccgttcgctcacagggacgggccccagcatcagtgggggccatatgggggcaaagtcccatttcctcggccgggcgtatgcccctctaaaatgacagcccaacccggccggccgtttggctctacaaaggattacccagatgaagttctgcaatttgcaagggcacatccgctcatgttttggccagtgaggcctcgccacggacggccagtccttgtaaagacccatctcgcccaacaactgcaccagattgtcgttgatagagtcgaggccgaggatggcacctatgacgtaatatttctaggaacagatagcggcagtgttttaaaagtcatcgcgctgcaggctggcgggagcgccgaacctgaagaggtggtcctggaagaactccaggtttttaaagtccccacacccatcacagaaatggagatttccgtgaaacggcagatgctttacgtcggaagccgtctgggtgtggcccagcttaggctgcaccagtgcgaaacctacggcaccgcgtgcgccgagtgctgccttgcccgcgacccttattgcgcatgggatggagccagttgcacccattatagaccttctctcggcaaaagacgctttagaaggcaggatattcgtcacggaaaccccgctctgcagtgtctgggtcaaagccaggaggaagaggcggtcggattggtcgctgcaacaatggtgtacggcaccgagcataattcaactttcttagagtgcctaccaaagtcaccacaagccgcagtgagatggctcctgcagagacctggcgatgagggaccagaccaggtgaaaaccgacgagcgcgtcctgcatacagagcggggactactgttcagacgcctgagtaggtttgatgccggaacatacacctgtaccactctcgagcacgggttcagccagaccgtagtgaggctggccctcgtggtaatcgtagcgtcccaattggataacttgtttcctccagaacccaaacctgaggaaccaccagctcgcggcggcctcgcaagtactcccccaaaggcctggtacaaggacattctgcagctcataggttttgccaacctgcccagagtagatgaatattgtgaaagggtatggtgcagaggaaccaccgagtgctcaggatgcttccgatcgcgaagccggggcaagcaggccagagggaagagctgggctgggctggagctcggtaaaaaaatgaagtcccgtgtgcacgctgagcataatcggactccaagggaagttgaagcgacatag

SEQ ID NO: 31787 - DNA, 1380 bp, synthetic construct
  source 1..1380: mol_type = other DNA; note = Synthetic coding sequence
atgaccgcagaagaaatgaaggcaaccgagagtggtgcgcaaagtgcccctttgcctatggagggggtcgacattagtcctaaacaagacgagggagtactgaaagtcattaagcgcgaaggaaccgggactgaaatgcctatgatcggcgatcgcgtatttgtgcattacacaggttggctgctggatggaacgaagtttgactccagtcttgacaggaaagataaatttagcttcgacttaggtaaaggcgaggtgataaaagcttgggatattgctattgctacaatgaaagtcggcgaagtgtgtcatattacatgcaagccagaatatgcttatgggagcgccggttctccacccaaaattccccccaacgcaacattggtattcgaggtggagctgtttgagttcaaaggagaggatcttaccgaagaggaggatggtggcatcatcaggcggatacagacccgcggcgaggggtacgcaaaaccaaacgaaggcgcgatcgtggaagtggcactcgagggttactacaaagacaaactttttgatcaacgcgagctgagattcgagataggagagggagaaaatctagatctgccttacggactggagagggccatacagaggatggaaaaaggcgagcatagcatcgtctatttaaagccgagttatgcatttggaagcgtgggcaaagaaaagttccaaatccccccgaacgcagagctcaagtatgaacttcatttgaaaagttttgagaaagcaaaagagagttgggaaatgaattctgaagaaaagctggaacagagcacaattgtgaaagagagaggaaccgtctattttaaagaaggcaagtacaagcaagcacttctgcagtataaaaagatcgtgagctggctcgagtacgagtctagcttttccaacgaggaagcacagaaggctcaagcattacgtctggcctcccacctcaacctggctatgtgccacttgaagctccaggcattttcagccgccatcgaaagctgcaacaaggcattagaactcgacagcaacaacgaaaaaggattgttccgccgaggcgaagctcatctggcagtcaacgatttcgagctggcccgagccgacttccagaaagtgttacagttgtatccgaataacaaagcagccaagacccagttagcagtatgccagcagcgaattagacgtcagctggcccgggaaaaaaaactgtatgcaaatatgtttgagagactcgcagaagaagagaataaagcgaaggcagaggcctcaagtggcgaccaccctacagacacagaaatgaaagaggaacaaaaaagcaacacagcaggatcacagtcacaagtagaaactgaggcctag

SEQ ID NO: 31788 - DNA, 477 bp, synthetic construct
  source 1..477: mol_type = other DNA; note = Synthetic coding sequence
atggaaccacctgagggcgcaggaactggggaaattgtaaaagaggcagaggtacctcaggccgcgttaggagtgccggctcagggcactggcgataatgggcacactccagttgaagaagaagttggcggaatccctgtcccagcccctggtttgcttcaggtcacggaaagacggcagccactctccagcgtctcttccctggaagtgcacttcgatctcctggaccttaccgaattgactgacatgagcgatcaggagcttgccgaagtgttcgccgactctgacgacgagaaccttaacaccgaatccccagctgggcttcatccactcccccgcgccggctacctgcgttctccctcatggacccgcacccgagcagaacaatctcacgaaaagcagccactcggcgacccagagcggcaggccaccgtgttggatactttcttgactgttgagcgaccccaggaggactag

SEQ ID NO: 31789 - DNA, 954 bp, synthetic construct
  source 1..954: mol_type = other DNA; note = Synthetic coding sequence
atggcctcagttattcctgcatcaaacagatctatgaggagtgatcgaaacacatatgtcggcaaaaggttcgtccatgtgaagaacccctacctggacctgatggatgaggacatcttgtaccacttggacctgggcaccaagacccacaatttacctgctatgttcggggacgtgaagttcgtgtgtgttggcgggtcccccaatagaatgaaagccttcgccctgttcatgcataaagaattaggatttgaggaagccgaggaggatattaaagatatctgcgctggaactgacaggtattgtatgtataaaactgggcccgtgctcgcaatttcccatggaatgggcatcccctccataagtattatgttacatgaactaattaagctgctacatcatgcaaggtgttgcgatgtgacaatcattcggataggcacatctgggggcataggcatcgcccctggtaccgtggtgattactgatattgccgttgatagcttcttcaaaccaagattcgagcaggtgatactggacaatatcgtgactagaagcacagaactagacaaggaactgtcagaagagctctttaactgttctaaagaaatcccaaattttccaactctcgtcggtcatactatgtgtacttacgatttttacgagggccagggaagactggacggggcactttgttcctttagccgcgagaaaaaactggactatctgaaaagagcttttaaagctggcgtccgtaatatcgaaatggagagtaccgtgttcgcagccatgtgcggtttgtgtggcctgaaggcagctgtagtgtgtgtcaccctgctggaccggctcgattgcgatcagattaacttgccacacgacgtcctggtggaatatcagcaaagaccccagctgctcatctcaaacttcatcagacgccgactaggactttgcgactag

SEQ ID NO: 31790 - DNA, 1095 bp, synthetic construct
  source 1..1095: mol_type = other DNA; note = Synthetic coding sequence
atgtccgaagtcgaagccgcagcgggggccacagcagttcctgccgcaaccgtgcccgcaaccgccgccggggtagtggcagtggtggttcctgttccagcaggtgagccacagaagggaggaggcgcaggcggaggggggggggccgcgtccgggcccgccgcggggacaccctcagcaccaggaagtaggactcccggcaatcctgccacggctgtctctggaacaccggcaccacccgccagatcacaggccgacaagccagtactagctattcaggtgttagggaccgtaaaatggttcaacgtaaggaatgggtacggatttataaaccgcaatgacaccaaagaagacgtgttcgtgcaccagacagccataaagcgtaataatcctcgcaaattcctgagaagcgttggggacggagaaacagtggaattcgatgtcgtggagggggagaagggagctgaagccaccaatgtaacaggccctggaggggtgccagtcaaaggatctcgatacgcgcctaatcgaagaaaaagccgacgcttcatcccccgcccaccctccgtggcgcccccgcctatggttgccgagataccttctgcgggaaccggacccggctcgaagggggaacgagcggaagattcaggacagagaccacggagatggtgcccgcccccttttttctacagacgcagattcgtaagaggcccacggccacctaaccagcaacagcctattgagggcacagaccgcgtggaacccaaagaaaccgcccctctagagggccaccagcaacagggagacgagcgggtacctccacctagattcagaccccggtaccgtcgcccttttcggccacgtcctaggcaacagcccactactgaaggaggggatggcgaaaccaaaccaagccagggcccagcagacggttcgagaccagaacctcagagaccccgaaaccgtccctattttcagagaagacgccaacaagctccgggcccacaacaggctcccggtcctcgccagcccgccgctccagagacatcagccccggttaattccggcgaccctaccaccacaattctggagtag

SEQ ID NO: 31791 - DNA, 5706 bp, synthetic construct
  source 1..5706: mol_type = other DNA; note = Synthetic coding sequence
atggccacctttcgaaataaccatatgaagactaaagcgagcgtgcgcaagagcttttccgaagatgtattccagagcgtcaaaagcctcctccagtcgcagaaggaattgtgttcagtaacagccgaagactgcctccaacaggatgaacacgctaacttgaccgaggtgacattcctcgggtttaacgaagagaccgatgctgcacatatccaagatctcgccgctgtgtcactcgaactgcccgacattctgaatagtctgcacttttgctctttgaatgagaacgaaattatatgtatgaaaaatataaataaaccattagatatctccagcgatccactgaatcaatcacacccatctggcatgctctgcgtgatgagagtttcgcccacttccccaaggttgcggatcgattttatattctcccttttgagcaaatatgctacgggcattcgttacactttagatacctttttacaccagaaacaccaactggagactacagacgaagacgacgacgacacaaaccagagcgtgagctcaattgaagacgatttcgtcacagcttttgagcaccttgaagaggaagaaacaagcaagccttataacgatggaatgaacatcaccgttctgaggagtcagtgcgatgccgcttcccaaacggttaccggacaccatctggaaacccacgatctgaaaattctcatatcctctggccaacagaagagtctagcaaagccttcaaccagttctgtcaatgttctcggccacaaggaacttcctagtgtaaagaccagcgtcacaacctcaatctccgaaccctggacccagcgctccttttaccgttctagcaatgcatctgataaagattccgatctacagaaaaccttcttcagctctagccctgcttactcatccgaatcggaatgttcttcacccagccccgttatctttctcgacgaagagggttaccagaaaagcctgaaagctaagcttgaactgcctaaaattccagtgatgaaagacgatatcgaggactcagactcagaggtctccgagttttttgattcttttgatcagtttgacgaactggagcagacattagagacctgcctctttaataaggacccagtcatagggaagtcgtctcagagaaaaggtcataaacacggaaagtcatgcatgaatccacaaaagtttaaatttgatcgtccagccctgcctgccaacgtgcgtaaacccactccaagaaagcccgaaagcccgtatggtaacctatgtgacgctccagacagcccaaggccagttaaggctagccgggaggactcaggcctcttttcgccaattagaagttcagccttctcgcccctgggaggctgtaccccagcagaatgtttttgtcagactgatatcggaggagatagaattcatgaaaatcacgattcagtatactatacttacgaagactatgctaagtcaataagctgcgaagtgcttgggagcgtactccgaactcatcacactaacactttatccaatattaacagcataaagcatggtgaaaataagacggtgacattcaaacatggcaatctagaccagaagaataagtcaaagaacaagtccctcatgattaaagactcaatccaaaagtttgccgcggacctggttgaaaaatcctttggaagcgcctttaaagatctccagaaaggagtctcaagctgtaccaatgcactgtaccatttggccatcaagttgacctctagcgtgctacagatggccttcgacgagctcaggcgccagagagctttttctcttaaagagcgcgccatcagtggtctggctaattttctagtctctgaagcattatcaaatgcactgaaggacctgcagtacgttaagaagcagatcttcactaacaccgtcgcccgcttcgcagctgatctcgccgaagagcttgtctttgaggggattatggaggtttgccagttctcatatcctcagacgccagccagtccccaatgcggtagtttcgacttcgaagataaagtggtcaaactgtacgccaaagatctgtcagagtctgtcattcaggaagccttcatcgaactgtctcaggtggatgtcacctttactaccaaagccgctgtatccgtgtcaactgacaacatcaaatatgtgagtgctgagtctgtggtaccatcaacacaggccgtcactttcagcccgtcttttcacaatcaggccatcatggtaacaaagcccgttcaggaatataaaaaagaatacaccgtgcaacaagctttattttgtacctcagggatcgtgacctctataccagtgcctttagccggaagtgcccttttgccctatcacatttctagcacagcgtgccaggcaaaagctcacctatcaagtgatgacagcaactctaacggcgactctgcacaggtacatatcgctacaaaaaaccgcgaggagaaagcagcctgtttaagaaacatctgcctgccttccgaacacaaccctgggaatcaaaacgatttcaagcctacaaatgatgatattgagatgcagtctagtagcaaactcccaaacgaccccgcgataatttctaatttctctgccgcagtagtgcataccatagttaatgaaacccttgagtcaatgacgtccctggaagttactaaaatggtcgatgagcgtactgattatctgacaaagtccctgaaggaaaagaccccccccttttcacattgtgatcaagccgtgctccagtgctccgaggcctccagcaacaaggacatgtttgccgaccgactatcgaaaagtataatcaaacactccatagacaagtccaaatccgtgattccaaacatagataagaatgccgtctacaaagaaagtttgcccgtgtcaggcgaggaatcccaacttacaccagagaagtcacctaaattccctgacagtcaaaatcagctaactcactgctcactcagtgccgcgaaggactgcgttcctgaatgcaaagtctcaatggtgcacggcagttctcttgaaaccctcccctcttgtccagctgtgacaggacaaaaatctgacctgaaagaatctgcaaaagaccaacccctaaagaaacataacctcaattctaccagtctggaagccctgtcttttgggcaagaaaatccgtttccccactcccatacatttagcagcacagctctgacatgcgtagatggcctgcacgttgaggacaaacagaaggtccgcgatcgaaatgttatacctgatacccccccatccacccctttagtcccgagccgggccagtagcgagtgggacattaaaaaacttactaaaaagctgaaaggtgaattggctaaggagttcgcccccgcaaccccaccgtcaacaccgcataacagcagcgtggggtctctgtctgaaaacgaacagaataccatcgagaaagaggagttcatgctaaaactgatgcgtagcctttccgaagaggttgaaagttctgagagcggcgagctgccagaagtcgatgtgaagtccgaacattccggcaagaaggtgcaatttgctgaggctctggccacacatattctgtccctcgctaccgagatggctgcctcacaccttgacaataaaattatacaggaaccaaaggtcaagaatccctgcctcaatgtccagtcacaaaggagcgtttccccgactttccttaacccatccgatgagaatctgaaaactctgtgcaactttgctggtgacctggctgctgaggtgataaccgaagccgagaagatagcaaaagtccggaattgcatgttattcaaacagaagaagaacagctgttacgccgatggcgacgaagactataaagtggaggagaaactcgatatagaggcagtcgttcacccccgcgaagtagacccattcatcctgagcctacccccctctagttgtatgagtggactgatgtacaaatatccctcatgcgaatctgtgacagacgagtacgccggacatctgatacaaatccttaaacaagagggaggcaacagcgagctgattatggatcaatatgcaaatcgcctggcctatagatctgttaaatcaggactccaggaagcagccaagacaacaaaagtccagtgcaacagtcgcatgttccccgtccctagcagccaggtgaagactaataaggagttgctgatgttttcaaacaaggaacatcatcaggaggccgataagaaaagacagagtaagcgcaatgaaggctatttttgtaagaatcagacctgcgagcggactttagatccttatagaaatgaagtttcacaactttattccttctccacaagcttagtacatagcattaccaaggatgccaaagaagagctcaccgccagcctggttggactgcccaaatcactcactgacagctgtctcttcgaaaaaagtggatacgaggaagataacgaatgtcacgtcacaccagagctccctaagagccttcagccatcatcacaaaatcatcgcttctatcactccactggatcgctcaatggttacggatgcggggacaacgtggttcaagccgtggaacaatacgccaagaaagtggtcgacgatacgctcgaattgaccttgggatctactgtttttcgcgtgagtgagaccaccaaaagtgcagaccgagtcacatatgccgagaaactgtcccccctaaccggccaggcatgtaggtattgcgacctcaaggagttgcacaactgcaccgggaacagtagccagcatttttttaggcagggcagtctcgcctcaagtaagcctgcatctaatccaaaattcagctctcgatatcaaaaatctcgcatctttcatctttccgttcctcagatccacgtcaatctcgacaaaaaggcggtcttagcagagaagattgttgctgaggcgatcgagaaagcagaacgggaactctcctcaactagtcttgcggccgactctgggatagggcaagaaggcgcaagtttcgccgaatcactggccacagagaccatgacagcggcagtgaccaacgttggtcacgccgtcagtagcagtaaagaaattgaagactttcagagtactgaaagtgtgtcctcccaacaaatgaatctaagcataggagacgacagcaccggaagctggagcaacctttcttttgaggacgagcaccaagacgaaagcagctcttttcaccatctttctgaatctaatggaaacagttcatcatggagtagcctcggcctggaaggtgatctctacgaagataatctcagctttcccacttcagacagcgatggcccggatgataaggatgaagagcatgaggatgaggtagagggcctgggtcaggacgggaaaacactactgattactaacatagatatggagccatgtacagtggatccacagctgcggataattcttcaatggttgattgctagcgaggcagaagtggctgaattatactttcacgacagcgccaacaaggaatttatgctgctatccaagcaattgcaagaaaagggatggaaggtgggcgatctgcttcaggccgtgttacagtattatgaagtgatggagaaagcttctagtgaggaacgatgcaagtccctcttcgactggttgttagaaaacgcctag

SEQ ID NO: 31792 - DNA, 417 bp, synthetic construct
  source 1..417: mol_type = other DNA; note = Synthetic coding sequence
atggcggaactgcagcaactgagggtccaggaggccgtggaatccatggttaagagtttagaacgcgagaatatcagaaagatgcaggggctcatgttccggtgcagcgctagttgttgtgaggacagccaagccagcatgaagcaggtgcaccagtgtattgagcgatgccacgtgccacttgcccaggcccaggccctagtgacttcagagctcgaaaaatttcaagatcgattggctagatgcactatgcactgcaatgacaaagctaaggacagtatcgacgcaggttctaaagagctccaggtgaaacaacagctcgattcttgtgtgactaagtgtgtagatgatcacatgcatctgattccaaccatgactaaaaaaatgaaagaggcactcctatctattggaaagtag

SEQ ID NO: 31793 - DNA, 1110 bp, synthetic construct
  source 1..1110: mol_type = other DNA; note = Synthetic coding sequence
atgacgctggaggcaataagatactcacggggcagtcttcagattttagaccaactgctcctacccaagcaaagccggtacgaagcagtcgggagcgtccaccaggcctgggaggcaatcagagctatgaaagtgcgtggtgcacctgccattgccttggtcggatgtctgtctttagcggtcgagttacaagccggcgcaggaggacctggcctagccgccctagtagccttcgtgcgtgacaaactgagcttcctcgtaactgcccgccccacggcagtgaatatggcaagggctgccagggacctcgccgacgtggcggccagagaggcagaaagagaaggtgcaactgaagaggctgtaagggaaagggtcatctgctgtacagaggacatgctggaaaaggatttacgggataacagaagcattggtgacctgggtgcacgtcacttgttggaacgcgtcgcaccatccggaggtaaggtgaccgtgctgacacattgcaacacaggcgcgttggctacggccggatacggaacagctctcggcgtgataaggagcctgcactcgctgggcagattggagcacgccttctgcacagagactagaccctacaaccaaggagcaagacttacagcattcgagcttgtgtacgaacaaataccagcgacactgataacagattccatggtggccgcagccatggctcacaggggagtttccgcggtggtggttggagcagacagagttgtggcgaacggggacaccgctaacaaagtcggtacttaccagctggcaatcgttgcaaaacatcacggcattcctttttacgtcgcggcaccatcaagcagctgtgatcttcggctcgagacaggcaaggagatcatcattgaggagaggccaggccaggaattaaccgacgttaacggtgtccgcatcgccgctccagggattggggtgtggaatccagcttttgatgttactcctcatgatttaattaccggaggtattataacagagcttggggtcttcgcccccgaggaacttagaacagcgctcaccacaacgatatccagtcgcgatggaactctcgatggtccccagatgtag

SEQ ID NO: 31794 - DNA, 3660 bp, synthetic construct
  source 1..3660: mol_type = other DNA; note = Synthetic coding sequence
atgatgtccttgtccgtccgaccgcaaagaagattactttccgcaagggtcaatcgaagccagtcattcgcaggcgtgctggggtcgcatgaaaggggccctcggagcttccctgtcttctctcctcctgggccaccacggaaacctcctgccctttcacgagtgtctcgcatgttctcagtcgcacatcctgccgccaaagttccccagcctgagcgcctggaccttgtctacactgccctgaaaagaggccttactgcatacttagaagttcaccagcaggaacaggaaaaactgcagggacagataagggagagcaagagaaattcccgacttggctttctatacgaccttgataaacaggtaaaatccattgagcggttcctgcggcgccttgagtttcatgccagcaagatcgacgagctttacgaggcatactgtgttcagcgacgattgcgagacggcgcatacaacatggtgagggcctacacaactggatcccctggctcaagagaggctagggatagtttagctgaggctactcgaggccatagggagtacacagaatccatgtgtttactagagtctgagctggaagctcagctaggagagtttcacctgaggatgaagggcctcgcagggttcgcgaggctctgcgttggagaccagtacgaaatttgtatgaaatacggaagacaacgttggaaactccgagggaggatcgaaggctcaggcaaacaagtgtgggattctgaggagacaatctttctgcctttgctgaccgaatttctgagtataaaagtgactgaactgaaaggactggctaaccatgtggtcgtaggaagtgtgtcatgcgaaactaaggacctttttgccgcccttccgcaggttgtggccgtcgatatcaatgatctgggaaccatcaaactgagccttgaggtcacatggagccccttcgataaggatgatcaaccttcagcggcctccagtgttaacaaggcttccaccgtgacaaagagatttagcacctactcgcaaagtcctcccgataccccctctctacgtgagcaggccttttataacatgcttagaagacaggaagaacttgagaatggaaccgcctggagcctctcatcggaatcttccgacgatagtagcagcccccaattgagcggaacagccagacattctcctgcgccccgtcccctcgtgcaacaacccgaacccctgcctattcaagtcgcattcagacgacctgagaccccctcaagtggccctctggatgaagaaggggccgtcgccccagtactcgccaatggacatgcaccctacagccgcactttaagccacatcagcgaagctagcgttgacgccgcccttgccgaagcttctgtggaagctgtgggccccgagagtcttgcctggggccccagtccacctacgcacccagccccgactcatggtgaacatccctccccagttccacccgctctcgatccgggccatagcgcgacgtcatctacgttaggtaccaccggcagcgtccccacatcaacagatcctgctccaagtgcccatctggacagcgtgcataagtccaccgactctggtccctccgaacttccaggaccaacacatacgaccacaggctccacatattctgctatcaccaccactcattccgctccctcccccctaactcatactacaacaggatctacccacaagcccattatatcaactcttactacgactggccccactctgaatatcataggccccgttcagacaaccaccagccctacacacactatgccatctcccacccataccacggcctctccaacacacacctcaacctcccccactcacacccccacctcacccactcacaagacttctatgtcacctcccacaactacgagccccaccccatctggaatgggattagtgcagaccgcaacctcgccaacacatcctacaacttctcctacacatccaaccacctccccaatcctcattaacgtctctcccagtacctcacttgaacttgcgacactgtcatctccctctaaacacagcgatcccacactgcccggaaccgattcactgccatgctcgccacctgtctccaattcgtacacccaggcagatcctatggcccctcgcaccccccacccaagccctgctcactcttctcgaaaaccactgaccagcccagcacctgatcccagcgaatcgactgtgcagtctctgtctcccacaccatccccgcccacccccgcaccacaacactcagacttgtgtctcgctatggccgtgcagaccccggtgccgacagctgccggcggatctggcgataggtcattggaagaggccctgggcgccctgatggctgctcttgatgattataggggacaatttcctgagctgcagggactggaacaggaggttacaagactggagtccctcttgatgcaaaggcaggggttgacacgaagtcgcgcttcttcgctatcaatcacagtagaacacgctttggagagtttttcgtttctgaatgaggatgaagatgaagacaacgatgtgcctggggaccgaccgccttcaagtccagaggctggtgcagaagacagcattgattcaccatcggcgagacccctgagtacaggctgtcccgccctggatgctgcgctggtgcgtcacctgtaccactgcagccgtctattgttgaaactcggaacatttggccccctccggtgccaggaagcttgggcgctagaaaggctgctgcgggaagcccgagttcttgaagccgtgtgcgaattcagccgcaggtgggagattcccgcgtcctccgcgcaagaagtagtccagttttccgcctccaggcccggctttctgacattttgggaccagtgcacagaacgtctctcatgcttcctttgccctgttgagcgtgttttgctgactttctgcaatcagtatggtgctcggctctcgcttagacagcccgggctagccgaagctgtgtgcgtaaaatttcttgaagatgccctgggacagaaattgcctagacgaccgcagcctggacctggggaacagctgaccgtgtttcagttttggagctttgtcgaaaccttggattccccgaccatggaagcatacgtgaccgaaacggcggaagaggttctgctagtgagaaaccttaacagcgatgatcaggcagtggtgctcaaggccctcagactggcaccagaaggccgactaagacgggatgggctgcgcgccctgtccagtctcctggtgcatggaaataacaaggtgatggctgcagtttcaactcagttgagatccctgtctcttggcccaacgttccgcgaacgagctctgctctgctttcttgatcaactcgaggatgaagacgtacagacacgagttgccggatgcctggccctgggatgtatcaaagcgccagaggggattgaaccactcgtgtacctctgtcagacagatactgaagctgttcgagaagctgccaggcagagtttgcagcagtgcggtgaggaaggacaatcagcacatcggaggctggaagaaagtcttgacgcacttcctcgcatctttgggcccggctccatggctagcactgcattctag

SEQ ID NO: 31795 - DNA, 1326 bp, synthetic construct
  source 1..1326: mol_type = other DNA; note = Synthetic coding sequence
atggcatcagtggccgctgcccgcgccgtaccggtgggatctggtctacggggcctccaaaggaccttaccgctagtggttatactcggggcaacaggcactggaaaaagtactctggcgcttcagttggggcaacgcttgggaggtgagatcgtgagcgccgactcaatgcaggtctacgagggtctagacattattaccaacaaagtgagcgcccaagagcagcgcatttgtagacatcacatgatttcgtttgtggaccctttagtgactaactacacagttgtagactttcgcaaccgtgcaactgcactgatcgaagatatctttgcacgagacaaaattccgattgtcgttggcgggaccaactactacatcgagtccttgctttggaaggtgctagtaaatacaaaaccacaagagatgggcacagagaaggttattgacagaaaggtcgagttggaaaaagaagatggtcttgtgctgcacaaacgactgtcacaggtggatcctgagatggccgctaaactgcatccccacgataaacgcaaggtcgcccgctcgctccaggtgttcgaagagaccggcatctctcacagtgagtttttacatcgtcagcatacggaagagggtggaggacccctgggtggccctctgaaattctcaaacccatgtattctatggcttcacgccgaccaggcagttctggatgaaaggttagataagcgcgtcgatgacatgctggccgcaggcttgcttgaagagctacgggattttcaccggaggtacaaccagaaaaacgtgtctgaaaactctcaggactaccaacacggaatttttcagtcaattggatttaaagagtttcacgagtatttgattaccgaaggtaagtgtaccctcgagacgagcaatcagcttctgaagaagggccccggtccgatcgttccacccgtatatggcctcgaggtctctgacgtatccaaatgggaagaaagtgttctcgagcccgccctcgagatagtccagtccttcattcaaggtcacaagcctaccgccaccccaatcaagatgccttataatgaggccgaaaacaaacgatcttaccacttatgtgacctgtgtgatagaataataattggcgaccgggagtgggcagcacatatcaaatccaaaagccatctgaatcagctaaaaaagcgtaggagactcgattctgatgccgtgaacactattgagtcacagagtgtctcccccgaccacaataaggaacccaaagaaaaaggatcgccaggacagaatgaccaagaactgaagtgcagtgtctag

SEQ ID NO: 31796 - DNA, 618 bp, synthetic construct
  source 1..618: mol_type = other DNA; note = Synthetic coding sequence
atggcagaacccctgcagcctgacccaggggccgctgaggacgctgccgcacaggccgtagagactcccggatggaaggctcctgaagacgcaggtccgcagcccggatcttacgaaatcagacactatggaccggcaaaatgggtgtcaacaagcgtcgaatccatggattgggatagcgccatccagacaggctttacaaaactgaactcctatatacaaggaaaaaatgagaaagaaatgaaaattaagatgacagctcccgtgaccagctatgtcgagcccggctctggccctttcagcgagtccactattacaatcagcctttatattcccagcgagcagcaattcgacccgcctaggcctctagagagcgacgtgtttattgaagacagggcagagatgacagtctttgtgagaagttttgacggtttcagtagcgcacaaaaaaaccaggaacaattactcacacttgcatctatcctgagagaggatggcaaggtctttgatgagaaggtatattatacggccggatataattcgccagtgaaattactgaacagaaataacgaggtctggttaatacaaaagaatgagccaactaaggaaaatgagtag

SEQ ID NO: 31797 - DNA, 624 bp, synthetic construct
  source 1..624: mol_type = other DNA; note = Synthetic coding sequence
atgagctgtacaattgaaaagatcctcaccgacgcaaaaaccctcctcgaacgattacgcgaacacgatgcggccgcagaatcacttgtggatcagagcgcagcattacaccggcgtgtggcagccatgagagaggcagggacggcgctgcctgaccagtatcaagaggatgcaagtgacatgaaagatatgtctaagtacaaaccccatatactgttatctcaggaaaacactcagatacgcgacctgcagcaggagaacagagaactttggatttctcttgaagaacaccaagacgcattagagcttattatgtctaaatatagaaaacagatgttacagctgatggtagcgaaaaaagctgtggatgcagaaccagtcttgaaggcccatcagtctcactccgctgaaatagaaagtcaaattgaccgaatatgcgaaatgggggaagttatgaggaaggctgtacaggtggacgacgaccagttttgcaagatccaggaaaaattagcgcaactggagctagagaataaggaactgcgtgagttactgagcatttctagcgagtctcttcaagctcgtaaagaaaactctatggataccgcctcacaagctattaaatag

SEQ ID NO: 31798 - DNA, 1032 bp, synthetic construct
  source 1..1032: mol_type = other DNA; note = Synthetic coding sequence
atgaatatccatcgcagtacccccattaccattgccagatacggccgatctagaaacaagacccaggatttcgaagaactgtcaagtatccggagcgccgaaccatctcagtccttttcaccaaacctaggtagtccatcacctcctgaaactcctaacctgtcccactgcgtctcgtgcatcggcaaatatctgttgcttgagccactggagggggaccatgtctttagggcagtgcacttgcattccggcgaagaactggtatgtaaagtcttcgatattagctgctatcaagagtcactagccccctgcttctgtctgagcgcccattctaatatcaaccagattacagagataattcttggtgaaactaaagcatatgtctttttcgaacgttcctacggggacatgcactcatttgtccgcacatgtaaaaaactccgggaggaagaagctgcgcgactcttttatcaaattgcttccgccgtagcgcactgccacgacggtgggcttgttctacgtgatctgaagctgagaaagttcatctttaaagacgaggagagaacacgagtgaagctagagtcacttgaggatgcttatatcctgaggggtgacgatgactcactgagcgataagcacggttgtccagcctacgtcagccccgaaatcttgaatacatccggttcctactctggcaaggctgctgatgtttggagtctcggtgttatgctgtacactatgttagtgggccgttaccccttccatgatatcgagcctagtagtttgttctctaaaattcgacggggccaatttaacatccctgaaacattgtcgccaaaagctaagtgcctgatccgctccattctgagacgagaaccaagtgagagactaactagccaggaaattctggatcatccttggttctctaccgatttttctgttagtaattctgcatacggcgcaaaagaagtgagcgatcagcttgtccccgacgtgaatatggaggaaaatctggacccttttttcaattag

SEQ ID NO: 31799 - DNA, 3048 bp, synthetic construct
  source 1..3048: mol_type = other DNA; note = Synthetic coding sequence
atgcgccgcttcttgagacccggccacgatcccgtgcgtgagcggctcaagagagatctatttcagtttaacaagacagtggaacatggctttccccaccagccctctgctctcggctattctccttctctccggatccttgcgataggtacgcgtagtggtgcgatcaagctctacggcgcgccaggcgtggagtttatgggccttcatcaggaaaacaatgctgtgactcagatccacctgctccccggtcagtgccaattggtgactcttctggacgataattccttgcatctttggtcattgaaggtgaaggggggagcgtcagagctccaagaggatgagtctttcacccttaggggccctcccggagccgcccctagcgccacccagatcaccgtagttctacctcattcctcctgcgaattgctgtacctgggcacagaatccggaaacgtcttcgtggttcaacttcctgcattccgcgcgcttgaagaccgcaccatcagtagtgatgcagtgcttcagcgccttccagaagaagcaagacaccggagagttttcgaaatggttgaggctctacaggagcatcctcgggatccgaaccagattctaatcggctactctaggggactggtcgtgatctgggaccttcagggttcacgcgtgctgtaccattttctttcttcccagcaattggaaaacatatggtggcagagggatggacgacttctggtgtcgtgccacagtgatggcagttattgtcagtggccagttagttccgaggcacagcagcctgagccactccgttccctggtaccctatggcccatttccttgcaaagctattacacggatcctatggctaaccacacgacaaggcttgcccttcactatcttccagggaggaatgccccgggctagttatggtgacagacattgcatctctgtgatccacgatggtcagcagaccgcgttcgattttacatccagagttattggcttcacagttctaaccgaagccgatccagctgccacatttgatgacccttacgctctggtggtgctcgccgaggaagaattagttgtaattgacctgcagactgctgggtggccccccgtgcagttgccttatctagcatcactgcattgctcagctattacctgctctcaccacgtcagtaatatcccactgaaattgtgggaacgcatcatcgctgccggctctcggcagaacgctcatttctccacaatggaatggccgattgacggaggtaccagtcttactcctgcccccccacagcgcgacctgctgctgaccggacacgaggatgggaccgtgagattttgggacgctagtggggtatgcctgcgactcttgtataagctctctaccgtcagagtttttctgaccgataccgatcccaacgaaaacttttctgcccaaggtgaggacgaatggccaccccttcgtaaggtaggaagcttcgacccctattctgacgatccacgactgggcattcagaaaatttttttatgtaagtatagtggttatcttgcagtcgccggaaccgcaggacaggtgctggtgttagagttaaacgatgaggctgccgaacaggctgtggaacaagtcgaagccgaccttttacaggatcaagagggataccgatggaagggccacgagcgtctggctgccagatctggaccagtgagattcgaaccaggcttccaacccttcgtcttagttcagtgtcagcccccagccgtggtgacctccctagccttgcactctgaatggcgactggttgccttcggtacctcccatggatttggactgttcgaccaccaacaacgacgccaggttttcgtgaaatgcaccctccacccttcagatcagttagctcttgaaggtccactgagcagagtcaaatccctgaaaaaaagcttgagacaatcgttccgacggatgcgcagaagcagggtatcaagccgtaagagacatcctgccgggccgccaggtgaagcccaggagggtagcgccaaagcagagcggcctgggctccagaacatggaacttgccccagtgcagagaaaaatcgaggctcgttccgcagaggattcattcaccggttttgtccgcaccctgtatttcgccgatacttatctcaaggattccagcaggcattgtcccagtctatgggccggaaccaatggcggtacaatctacgcctttagtctgagagttcccccagccgagcggagaatggacgagccagttagggctgaacaggcgaaagaaatccagctgatgcacagagcccccgtggtcggaatacttgtgctggacggccacagcgtgcctctccccgaacctctggaagtcgcgcacgatctgagtaaaagtcctgacatgcagggttcccatcaactattggtcgtgagtgaggagcaatttaaggtgttcacactgccaaaagtgtctgcaaaactaaaactaaaattaaccgcactggaaggaagccgcgtcagacgagtctcagtcgcacactttggctcccggagggccgaggactacggtgaacaccacctcgcagtgctcactaatctgggcgacatccaggttgttagccttccgttactgaaaccccaggtacgatactcatgcataagacgggaggatgtgagcggtattgctagttgtgtgtttaccaaatacggccagggcttctatctgatcagtccctcagaattcgagagatttagtctcagcaccaagtggttggtagagccaagatgtctcgtggactcagcggagaccaagaaccacaggccagggaacggtgccgggcccaaaaaagccccttcaagagccaggaacagtggaactcagtctgatggcgaagagaagcagcctggtttagttatggagagagccttactatctgacgaacgagccgcaacgggcgtgcacattgaacctccttggggagctgctagtgctatggccgaacagagcgaatggttaagcgtccaagcagcccggtag

SEQ ID NO: 31800 - DNA, 582 bp, synthetic construct
  source 1..582: mol_type = other DNA; note = Synthetic coding sequence
atgctcggagtgttagaactactgctccttggtgcggcctggctggccggacctgctcgaggccaaaatgagacagaaccaattgtgctggaggggaagtgtctcgtggtgtgcgactccaatcctaccagtgatccaaccggcacagcacttggcatcagtgtccggtcgggctcagctaaagtggcttttagcgccatcagaagcactaatcatgaaccttctgaaatgtctaacagaacaatgataatctattttgatcaagtactcgtaaatattggcaataacttcgactcggagcgcagtacattcatcgctccgcgtaaagggatatactcctttaactttcacgtggtcaaggtgtataataggcaaacaatccaggtctcactaatgcttaacggatggccggttataagcgctttcgctggcgatcaggacgtgaccagagaagcagcatccaacggcgtgcttattcaaatggaaaaaggggatagggcgtatcttaagttagagcggggtaatctcatgggaggatggaagtactctacattttctgggttcctggtgtttcccctgtag

SEQ ID NO: 31801 - DNA, 1530 bp, synthetic construct
  source 1..1530: mol_type = other DNA; note = Synthetic coding sequence
atgggcgtcttaaaattcaagcacatattctttagatcctttgtcaaatcctccggcgtttcccaaattgttttcacttttctactgatcccctgttgccttacacttaactttcgggcaccccctgttattcctaatgtgccctttctgtgggcatggaatgcgccctcagaattctgcttaggtaagtttgacgaacccttggatatgtcactattttcatttattggcagtcctcgaatcaacgctaccggccagggtgtaaccatattttatgtagatcggttagggtactacccatacatcgattctattacaggggtcacagtgaatggtggcattcctcagaagattagcttacaagaccatctggataaagcaaaaaaagatatcacattctatatgcctgtggataacctgggaatggccgttattgactgggaagagtggagaccgacatgggcccgtaattggaaacctaaggatgtgtacaagaatcggtccattgagctggttcaacagcaaaacgtacaactgtcccttacagaggccacagaaaaagccaagcaggaattcgaaaaagcagggaaagattttctggtggaaacaatcaagctcggcaagttactgcgtcccaatcacttgtggggttactatctttttcccgactgctataatcatcattacaagaagcctggatacaatggtagctgttttaacgtcgaaattaaacgcaatgacgacctttcatggctttggaacgagtccaccgctttgtacccctctatctatttgaacactcagcaaagtcccgttgccgcaaccctatatgttcgcaacagagtgagggaggcgatccgcgtcagtaaaatcccagatgccaaaagccctctccctgtcttcgcttataccagaattgtgttcactgatcaggtcttaaaatttctgtctcaggacgaattagtctatacattcggcgaaactgtcgctctcggagcttcagggattgtgatttggggaactctctcaatcatgcgctctatgaaaagctgcttgctcttagataactacatggaaaccatcctcaatccttacattatcaacgtcacccttgccgccaagatgtgctctcaggtgctgtgtcaggaacaaggggtttgcatcaggaagaactggaattcctccgattacctacatctaaatccagacaacttcgccatacaactcgagaaaggcgggaaatttaccgttcggggcaagccaaccctcgaggacctggaacaatttagcgaaaaattttactgctcctgttattcgaccctctcctgcaaggagaaggccgacgtgaaagataccgatgccgtcgacgtgtgcatcgcagatggggtctgcatcgacgccttccttaagcctcccatggaaaccgaggagccacagatcttctataatgcatctccttctacgctctcagccaccatgttcatcgtctccatcctctttctcattatctccagcgttgcatccctttag

SEQ ID NO: 31802 - DNA, 1437 bp, synthetic construct
  source 1..1437: mol_type = other DNA; note = Synthetic coding sequence
atggcacatgtgccagcacgcacaagtccaggacccggtccacagctcctgctccttttgctgccactgttcttgctgcttctgagagacgttgctggcagtcatagagcccccgcttggtcggccctcccagccgcagcagatggactgcaaggggacagagacttgcagcgacaccccggcgatgcagccgctacattgggaccctctgcacaagacatggttgctgttcatatgcatcgcctatatgagaagtactcacggcaaggcgcaagacctggtggagggaatactgtccgatcctttcgcgccagacttgaggttgtcgatcaaaaagcagtttatttctttaatctcacctcgatgcaagactctgagatgatcctcaccgccacatttcacttttacagtgaaccaccaagatggcctcgagcactcgaagtactgtgtaagccgcgggccaagaatgcatcagggcgcccgctcccactaggccccccaacacgccagcatcttctattccgtagcttgtctcaaaatacagcaacccaaggcctcctgcgaggagccatggctttggcccctcctccacgcggcctatggcaagccaaagacattagccccatcgtgaaggcagcgcggcgtgatggtgagcttctcctttccgctcagctggactccgaggaacgggacccaggagtgcccagacctagcccttatgctccgtacatactggtctatgctaacgacctcgccattagcgaacctaattccgtcgctgtcactctgcagagatatgatccttttccagctggagaccctgaacctcgggccgcacccaataatagcgctgatccaagagtacgccgggccgctcaagccactggacctctgcaggacaacgagttgcctggactcgacgagagaccacccagagcgcatgcccagcattttcataaacaccagctgtggccttccccattccgcgctttgaaaccaagacctggaagaaaagacaggcgaaaaaagggacaagaggtctttatggcagccagtcaggtccttgacttcgacgaaaaaacaatgcaaaaagctcgcagaaagcagtgggacgagccgagggtatgcagccggcgctatcttaaagtggactttgcggatattggttggaatgaatggatcattagccctaagagcttcgacgcttactactgtgccggagcctgtgaattcccaatgcccaaaatcgtgcggcctagcaaccatgccactatccaatccatcgtgcgcgccgttggtattatccccggaatcccagaaccgtgttgcgtgcccgacaagatgaatagcctcggggtcctctttctggatgagaatcgaaacgtcgtgctgaaggtatatccgaacatgagcgttgacacatgtgcctgccgctag

SEQ ID NO: 31803 - DNA, 1941 bp, synthetic construct
  source 1..1941: mol_type = other DNA; note = Synthetic coding sequence
atgagcaaaggacctgctgtaggaattgacctgggaacaacttactcttgtgttggagtgtttcagcacggcaaggtggaaatcatagccaatgatcaggggaataggaccaccccttcatacgtggccttcacagatacagaaagactcatcggggacgctgcgaagaaccaggttgcaatgaatcctaccaacacagtattcgacgccaaacgcctcatcgggaggcgatttgatgacgctgtcgtacaatcagacatgaagcattggccattcatggtggttaacgatgccggacgacctaaggtgcaagtcgagtacaagggagaaacaaagtcattttaccccgaggaggtaagtagtatggtattaacaaagatgaaagaaatcgccgaggcctacttgggtaagactgtgactaatgccgttgtaacagtgcccgcctattttaacgacagccagagacaggccacgaaggacgcaggaacgatagccggtctaaacgttttacggatcatcaacgaacctacagccgcggccattgcgtatggtctggacaagaaagtgggggcggagagaaatgtgctgatctttgatcttgggggtggtactttcgatgtgagcattcttaccatagaagatggcatctttgaagttaaatcaacagctggtgatacacacttaggcggggaagatttcgacaatcgaatggtcaatcactttattgcagagtttaagcgaaaacataagaaggatattagcgaaaataaacgggcagtccggcggctgaggactgcatgcgagcgagccaaacggacactgtcaagcagcacacaggcaagcattgagattgacagcctctatgaaggtattgacttttacacctctatcacaagggcgagattcgaggaacttaacgccgacctgtttcgcggaaccttggacccagtagagaaggccctcagggacgctaagcttgataagtctcaaatacacgacattgtgctcgtaggtggctcgacccggattccaaagattcagaagctcttgcaggattttttcaacgggaaagagcttaacaagtccatcaacccagatgaggccgtggcatatggcgctgctgtgcaggctgctatactctccggagataaatctgagaacgtgcaggatctcctccttctggatgtcacacctctatcgttggggattgagaccgcgggaggtgttatgaccgttctgattaaacgaaacaccactattcctacaaagcagacccagacattcactacttactctgacaatcagcctggtgtgctaattcaggtctacgaaggagagagggcaatgacaaaagataataacctcctggggaaattcgaactcacagggatcccaccagccccacgaggagtcccacagattgaggtaacattcgatattgacgcaaatggtatcttgaacgtgtcggccgtagacaagtcaacaggaaaagaaaataagataacaatcaccaacgacaaaggaaggttgtcgaaggaggacattgaacgaatggtccaggaagcagagaaatataaagccgaagacgagaaacagagagataaggtttccagcaaaaattcactcgagagctacgcatttaatatgaaagcaactgtggaggatgaaaagcttcaggggaaaattaacgacgaggataaacagaagatactggataaatgtaatgagattattaactggttggataagaaccaaacagcagaaaaggaggaattcgaacatcaacagaaggagctagagaaggtgtgcaatccaatcattacaaaattataccagagtgcaggaggaatgcccggaggcatgcccgggggcttcccaggtggcggagcacctccaagcgggggcgcttcctctgggcccactatagaggaggttgattag

SEQ ID NO: 31804 - DNA, 1632 bp, synthetic construct
  source 1..1632: mol_type = other DNA; note = Synthetic coding sequence
atgcgcaaacccgcagctggttttctgccctctctgttgaaagtactgttgctgccattggcccccgccgctgcccaggattctacccaagcctctacccccgggagcccactgagtcccaccgaatacgaaagattttttgccctcctcacacccacctggaaagctgaaaccacctgccgactgcgcgctactcacggatgcagaaatcctacattagtgcagcttgaccaatacgagaaccacggattggtccctgatggagcagtttgtagcaacctgccctacgctagctggttcgaatctttctgtcagtttacccattatcgatgcagtaatcatgtgtactacgctaagcgggttctgtgtagtcagccggtctcaattctttcccccaatacgctcaaggagatcgaggccagcgccgaagtttctccaactaccatgacaagtcccataagcccccacttcaccgttaccgaaagacagacattccaaccatggcctgaacgactgtctaataatgtcgaagagctgctgcagtcttctttgtccctgggtgggcaggaacaggcacctgagcataaacaggaacaaggggtagaacacagacaggaacctacacaggagcataagcaggaggaaggccagaagcaggaagaacaagaggaggagcaggaagaagagggaaaacaggaagaaggacagggcacaaaggaagggagggaggccgtgagtcaacttcagacggacagtgagccgaagttccatagcgagtctctgtcatcaaacccatcttcctttgcaccccgtgtgcgggaagtagagtccacgcccatgatcatggaaaatattcaggagcttataagaagtgcacaggagattgatgaaatgaacgaaatttacgacgaaaactcctactggagaaatcagaacccggggtcacttttacaactgccccatactgaagctctactggtgctttgttattcaatcgtcgaaaacacgtgtatcattaccccaaccgccaaagcttggaaatacatggaagaagagatattgggatttggtaaaagcgtctgcgactccctaggaagacgtcacatgtccacatgcgccttgtgcgatttttgctctctcaagctcgagcaatgccattccgaagcttccctccagaggcagcagtgcgatacctcacacaaaactccatttgtctctcccctactggcaagtcagtctctctctatcggtaaccaagtgggttcaccagaatctggacgcttctatggccttgatctttacgggggacttcatatggacttttggtgcgcaagactcgcaacaaaaggctgtgaggacgtcagagtgagcggatggctgcagaccgaatttcttagctttcaggacggagatttcccgaccaagatttgcgacaccgactatatccagtaccctaactactgctctttcaagtcccagcagtgccttatgcgcaacaggaataggaaagtttctcgaatgagatgtttacaaaatgaaacttatagtgctctgtctccgggcaagtctgaagatgttgttctccgctggagccaggagtttagtacattgacactcggccaattcggatag

SEQ ID NO: 31805 - DNA, 2349 bp, synthetic construct
  source 1..2349: mol_type = other DNA; note = Synthetic coding sequence
atggccccgtcagcttgggcaatctgctggttgttaggaggattactgctgcacgggggctcatcagggccaagccccggaccaagtgttccacgactgcgcctcagttatcgtgacctcttgagtgccaatcgatcagcgatctttctcggcccccagggctccctcaatcttcaggccatgtatcttgacgaatatcgcgaccgcctctttctcggaggcttggatgcgctgtactcccttcgcctagaccaagcttggccggatcctagagaggtgttgtggccacctcagcccggtcagagagaagaatgcgtacgaaagggtagagatcccttaacagaatgcgcaaatttcgttcgggtgttgcagcctcataacagaacccacttacttgcctgtggcactggcgcctttcagccaacatgcgctctgatcacggtcggacaccggggagaacacgtccttcatctggaaccaggctctgtagaatccggtcgcggccgctgcccacatgagccttctcgcccctttgcatcaaccttcattgatggggaattgtatacaggccttacggcagacttcctcggccgtgaagccatgattttcagatctggaggacctcggcctgctctacgtagtgacagcgatcaaagtctgctacacgatccccgctttgttatggccgccagaataccggaaaattctgaccaagataatgacaaagtgtatttcttttttagtgaaacggtgccgagccctgacggaggctcaaatcacgtaactgtttccagagtgggtagggtgtgtgtcaatgacgctggcggccaacgggtgttggtgaacaaatggtccaccttcctgaaagctagactcgtatgtagcgtcccaggacccggtggcgccgagactcattttgatcaattagaagacgtgtttctcctgtggcccaaggccggaaagagtcttgaagtctatgccttgttctcgaccgtcagtgccgtcttccagggcttcgcagtctgcgtctaccacatggcagacatttgggaagtttttaatgggcctttcgctcaccgcgatgggccgcagcatcaatgggggccctatggaggaaaagtgccctttcctagacctggcgtgtgtccaagcaagatgacagcccagcctggccgcccattcggttccacaaaggactatcccgacgaagtccttcagtttgctagggctcatccattaatgttctggcctgtgcgtccgcgtcatggaagaccagtgctggtcaaaacacatttggcccaacaattgcatcagattgtggtggatagagtcgaagctgaagacggtacctacgacgtgattttccttggaaccgacagtggatctgtgctcaaagtgattgctctccaggcgggcggctcagccgaacccgaggaagttgtgctagaggagctccaagttttcaaagtccccaccccaatcacagaaatggagatttccgtcaaacgacagatgctgtatgttggatcccgcctcggagtcgcccagcttcgcttacatcagtgcgaaacatatggcaccgcttgtgctgagtgttgtctggcgagagacccttactgtgcttgggacggagcgtcctgcacacattacagaccgagcctgggaaaaaggaggttcagaagacaggacattcgacatgggaatccagctctccagtgcctgggccaatcacaagaggaagaagctgtcggcctggttgccgccacgatggtttatgggacagaacataactctaccttcctcgagtgcttgccgaaatcaccacaggccgcagtaagatggctgcttcagagacccggggacgagggacccgaccaggtaaagacagatgagagagtgctccacactgaaagaggcctgctgtttcgccgcctgagccgcttcgatgctgggacctatacatgcacaactctcgagcacggattttcccaaaccgtcgtgcgcctcgcgctagttgtaatcgtggcctcacagttagataatttatttccccccgaacccaagccagaagagcctcctgctcggggtggcctggcaagcaccccccccaaagcatggtataaagacatacttcagctcattggattcgctaacctccctagagtggacgagtactgcgaaagggtgtggtgcagaggaacaaccgaatgttccgggtgttttagaagtcggagccgtggcaaacaagctaggggaaagagttgggcaggactcgagctggggaaaaagatgaagagccgtgttcacgcagaacataataggacccctcgcgaggttgaagcaacatag

SEQ ID NO: 31806 - DNA, 1395 bp, synthetic construct
  source 1..1395: mol_type = other DNA; note = Synthetic coding sequence
atggaaccttcgtcccttgaactccccgctgacacggtgcagcggatagcagcagagctgaagtgtcaccccacggatgaaagagtggcgctccatcttgacgaggaagataagctccgtcatttccgggaatgtttctacattcctaagatccaagatctgcctccagtcgatctgtctcttgtgaacaaggatgaaaacgcgatctattttcttgggaattcgttgggccttcagcctaagatggtcaagacctacctggaggaggaactggataaatgggccaagattgccgcctacggtcatgaagtgggtaagaggccgtggattactggtgacgaatctattgttgggcttatgaaagacattgtgggtgccaacgaaaaggaaatagcgcttatgaatgcattgactgtgaatctgcatctgcttatgctttcatttttcaagcccactcccaaacgctacaaaatcctgctcgaggccaaggcgtttccgtccgatcactacgcaattgagtcccaactgcagctccatggactgaatatagaagagtcgatgcgcatgattaagccccgtgagggagaagaaactcttcgaattgaggacattcttgaggtcatagaaaaagaaggagattccatcgccgtgatcttgttttccggagtgcatttctacaccggacaacacttcaatattccagcgatcaccaaggcaggtcaggctaagggatgttacgtcggttttgacctggcgcatgcagtggggaatgtggaattgtatctgcacgattggggggtggatttcgcatgttggtgttcctacaaataccttaacgccggagcaggcggaatagcaggagcattcattcatgaaaagcatgcacacaccatcaagccagctcttgtgggatggtttggccatgaactctccaccaggtttaagatggataacaagctgcaactgatacctggcgtgtgtggttttcgaatctccaatcctcctattttgctggtgtgttcacttcatgcgtcgttggagattttcaagcaagccacgatgaaagcactcagaaagaagtctgtcctgctgaccgggtacttggagtacctgattaagcacaactacggaaaagataaagcagcgaccaaaaaaccagtggtgaacattatcactccatctcacgttgaagaaagaggatgccaattgactattacctttagcgtccctaacaaggacgtgttccaggaactggaaaagagaggggtggtctgtgacaaaagaaaccccaacggtatccgcgtggcaccagtaccactttacaacagctttcacgacgtctacaagtttactaatctgttgacttcgattctggatagcgcggaaaccaagaac

SEQ ID NO: 31807 - DNA, 1395 bp, synthetic construct
  source 1..1395: mol_type = other DNA; note = Synthetic coding sequence
atggagccctcaagccttgaactcccagcggacaccgtgcagcgcatcgccgcagaattgaagtgccacccgactgacgaacgggtggccctccacttggatgaggaagacaaattgcgccacttcagggagtgcttttacatccccaagatccaggacctcccgcctgtggacctctccctggtgaacaaggacgagaacgctatctatttcctgggaaattccctcggactgcagccgaagatggtgaagacctacttggaagaagagctcgataagtgggcaaagattgcggcatacggccacgaagtgggaaagcgcccttggattaccggcgacgagtcgatcgtcggtctgatgaaggacatcgtgggcgctaacgaaaaagagatcgctttgatgaacgctctgactgtgaacttgcatttgcttatgctgtcgtttttcaagccaacgcctaagcgatataagatcctgctcgaggcgaaagcgtttccctcggaccactatgccatcgagtcccaactgcaacttcacggactgaacatcgaggagtccatgcggatgattaagccgcgggaaggggaagaaaccctgagaatcgaggatatcctggaggtgatcgaaaaggaaggagactcaatcgcagttattcttttttcgggagtccacttctacactggacagcacttcaatatccccgccatcaccaaggcgggccaagccaagggatgctacgtgggatttgacctcgcgcatgccgtagggaatgtcgaactgtacctccatgattggggcgtcgatttcgcctgctggtgtagctacaaatacctgaacgccggtgcaggaggaatcgccggtgccttcattcacgaaaagcatgctcatacgatcaagccagccctggtgggttggttcgggcacgaactctccactcggttcaagatggacaacaaactgcagttgatcccgggagtgtgtggattcagaatctcaaaccctccaatactgctcgtttgctcgctccacgccagccttgaaatcttcaagcaggctactatgaaggctctgagaaaaaagtcagtgctgctgactgggtacctggagtatttgattaagcataactacgggaaagataaggcggctaccaaaaaaccagtggtcaatatcatcaccccttcccacgtcgaagagcgcggatgtcagctgacgatcaccttctcggtgcccaacaaggatgtgtttcaagaactggaaaaacgcggagtggtatgcgataagaggaacccgaacggaatcagagtcgcgcctgtgccgctctacaacagtttccatgacgtctacaaattcaccaatctgctgacttccattctggatagcgcggagacgaaaaac

SEQ ID NO: 31808 - DNA, 1395 bp, synthetic construct
  source 1..1395: mol_type = other DNA; note = Synthetic coding sequence
atggagccatcaagccttgagctcccagcagacaccgtgcagcggatcgccgcggaactcaaatgtcatccgactgacgaacgtgtggccttgcaccttgacgaggaagataaacttcgccatttccgggagtgtttttacatacctaagattcaagatctcccacccgtcgacctgtcactggttaacaaagatgagaacgcaatctactttcttggaaacagccttggcctccaacctaagatggtaaaaacttatctcgaggaagaacttgacaagtgggccaaaattgccgcttacgggcacgaagtgggtaagaggccatggattactggtgatgaatccattgtgggtcttatgaaggacatagtgggggccaatgagaaagaaattgcgctgatgaacgcacttacggtgaaccttcatcttctcatgcttagctttttcaagccaactccaaaaagatataagattctccttgaagcgaaggcctttccttccgatcattacgcgattgaatcgcaacttcagcttcatggactgaatatagaggagtcgatgcggatgattaagcctcgcgaaggagaggaaaccctgcgaattgaggacattctggaagtgattgagaaagaaggtgatagcatagccgtcattcttttttcgggtgtgcatttctacaccggccaacatttcaatataccagctattactaaagcaggacaagcaaaaggatgttacgtgggattcgatttggctcatgcagtcggtaatgtcgaactctatttgcatgattggggggttgattttgcgtgctggtgctcgtataagtaccttaatgcaggcgctggtggaatcgcaggggcattcattcacgagaagcacgcgcataccatcaaacctgcgctcgtcggatggtttgggcatgagctttccaccagattcaagatggataacaagctccagcttatccccggagtctgtggtttcagaatctcaaaccctcctatccttctggtgtgttcacttcatgcatcgctcgagatctttaaacaagcgaccatgaaggcacttcgtaaaaagtccgtgcttcttaccggctacctggaataccttatcaagcataactacggcaaggataaagctgcaactaagaagccagtggtcaacatcattactccttcacatgtcgaagaaagaggatgtcagctcaccatcactttctccgtgccaaacaaggacgtgtttcaggagctcgaaaagaggggagttgtgtgcgacaagaggaatcctaacggaattcgggttgcacctgtgcccttgtacaacagctttcatgatgtgtacaaattcaccaatctcctgacttccattctggatagcgcagaaacgaagaat

SEQ ID NO: 31809 - DNA, 1395 bp, synthetic construct
  source 1..1395: mol_type = other DNA; note = Synthetic coding sequence
atggagccaagctcactggagctaccagccgacacagtacaacgaatcgctgctgaactgaaatgccaccccacagacgaaagggtggcactgcatctggatgaggaagataagctccgacactttcgtgaatgtttttatataccaaagatacaggatttacccccagttgacttgagtctggttaataaggacgaaaacgcaatctattttttaggcaacagcttagggctgcagccaaagatggtcaaaacctacctggaagaagagctggataaatgggccaagatcgcagcatatggacatgaggtggggaaaaggccttggattacaggcgatgaaagcatagttggtctgatgaaagacatagtgggcgccaatgagaaggagatcgccctgatgaatgctctgaccgtgaatctgcatctactgatgctatcttttttcaaacccacccctaagcgctataagatcctgctggaggcaaaagcattcccctctgatcattatgctatagagagtcagctccagttacatggcctcaacatagaggagtcaatgagaatgataaagccccgagagggcgaagagacactgcggatcgaggatatactggaggtgatcgaaaaggagggcgattccatcgcagtaatcttattcagcggagtgcatttttacaccggacagcactttaacatccccgccatcacaaaagctgggcaggccaagggatgctacgtgggctttgacttggcccacgccgtaggcaatgttgagctgtacctgcatgattggggcgtggatttcgcctgctggtgttcttataagtacctcaacgccggcgctggcgggatagccggcgctttcatccacgaaaaacatgcacataccataaagcccgcccttgtggggtggtttgggcacgaactgagtacccggttcaaaatggacaacaaactacagctgattccgggcgtttgtggttttagaataagcaacccacccatattactggtatgttctctccatgcctctctggaaatattcaagcaagccaccatgaaagctctgcgcaaaaaaagcgtgctattaacaggctaccttgagtatctgatcaaacacaattatgggaaagacaaggccgccaccaagaagccagtcgtgaacatcataactcctagccacgtggaagaaagggggtgccagctcacaatcactttttctgtgccaaataaagatgtgttccaagaactcgaaaaacggggcgttgtgtgtgacaaacggaatcccaatggcattcgtgttgctccagtccccctgtataacagttttcacgacgtgtacaaattcaccaacctactaacctcaatactggacagcgccgagacaaaaaac

SEQ ID NO: 31810 - DNA, 1395 bp, synthetic construct
  source 1..1395: mol_type = other DNA; note = Synthetic coding sequence
atggaaccgagctccctggagttgcccgccgacacagtgcagcgaatcgctgcggagctgaagtgccatccgaccgatgagcgagtggcactccacctggatgaagaagacaaattgcgtcacttcagggagtgtttttacataccgaagatccaggatctcccgcctgtggatctgtctctggtaaataaggatgaaaatgccatctactttctgggtaacagcctgggattacaaccaaagatggtcaagacttacttggaggaggaactcgataagtgggctaagattgctgcttacggtcacgaggtgggcaagcgaccgtggatcacgggtgacgagagtatcgttggcctgatgaaggacatcgtgggcgccaacgagaaagagatcgccctgatgaatgccctgactgtgaatcttcacttgttgatgctgagcttctttaagccaacgcctaagcgctataagattctattagaagcgaaggcgtttccatcggatcactacgcaatcgagtcccagctacaactgcacggtctgaacatcgaagaatcaatgcgtatgattaagccccgagagggcgaggagacactccgaattgaggatatattggaggtaatagaaaaagaaggcgattccattgccgtgattctgttctcgggcgtgcacttttataccggccaacatttcaatatcccggcaataactaaggcaggacaagccaagggttgctacgtgggtttcgatctggcccatgcagttggaaacgtcgagctgtatctgcacgattggggtgtagatttcgcttgttggtgttcctataaatatttgaacgccggcgcaggtggcatcgccggagccttcattcatgagaagcacgcccacaccatcaagccggccttggtgggctggttcggtcatgagctgagcacccgcttcaagatggataataaactacagctaataccaggagtttgcggctttcgcatatcgaatccgcccattttgctggtgtgcagcctgcatgcttccttagagatctttaagcaggcaaccatgaaggctcttcgtaaaaagtctgtactcttaactggctacctcgaatatttgatcaagcacaattatggcaaggataaggcggcgaccaagaagccagttgtgaacatcatcacccccagtcacgttgaggagagaggatgccagttgacaattaccttcagcgtccccaacaaggacgttttccaggaactggaaaagcgcggagtggtgtgcgataagcgtaaccccaatggtattcgcgtggccccggtaccgctgtacaactcgtttcacgatgtgtataagttcacgaatctgctcacttcgatcctggactccgctgagacaaaaaac

SEQ ID NO: 31811 - DNA, 1395 bp, synthetic construct
  source 1..1395: mol_type = other DNA; note = Synthetic coding sequence
atggaaccctcgagcctggaactgccagcagacaccgtccaacgcatcgctgctgaactgaagtgccatccgactgacgaacgcgtggcgctccacctcgatgaggaggataaactccggcacttccgcgagtgtttctacatcccgaagattcaggacctgccaccggtcgacctctctctggtgaataaagacgagaacgccatttacttcctgggaaactcgctgggcctccagccgaagatggtcaagacctacctggaggaagagttggacaagtgggctaaaatcgccgcgtacggacatgaggttggcaagcgcccgtggatcaccggagacgagtcaattgtcgggctgatgaaggatatcgtgggagctaatgaaaaagaaatcgccttgatgaacgctctgaccgtgaacctccatctgttgatgctgtcattctttaagccaactcctaagcgctacaagatcttgcttgaagcgaaggccttcccatcagaccattacgctatcgaaagccaactccagctccacggtcttaacatcgaagaatcgatgcggatgatcaaaccgagagaaggagaggaaacccttaggatcgaggacatcctcgaagtgatcgaaaaggaaggagactccatcgccgtgatcctgttttccggggtgcacttctacaccggccagcacttcaacatccctgccattactaaagcgggccaggcaaagggatgctatgtgggcttcgacctcgctcatgcagtcggaaatgtggagctgtacttgcatgattggggagtggactttgcttgctggtgttcgtacaaatacctgaacgccggggctggcgggatcgcaggagcctttatccacgaaaagcacgcgcacaccatcaagcctgcactggtggggtggttcggccacgaactgtccacgcgctttaagatggacaacaaactccaactcattccaggagtctgcggcttcaggatctccaaccctccaatcttgctggtgtgctccctccatgctagcctggaaatctttaagcaggcaactatgaaggctttgaggaagaaatccgtgctgttgacgggctatctggagtacctgatcaagcataactacggaaaagacaaggcggccactaaaaagccggtggtcaacatcatcactccgagccacgtcgaagagcggggttgccaattgacgatcacctttagcgtcccgaacaaggatgtctttcaggaattggaaaagcgcggagtcgtgtgtgacaagaggaatccgaatggaattagagtcgccccagtgccattgtacaactccttccatgatgtgtacaagtttactaatctgttgacttcaattctggactccgcggagacgaagaac

SEQ ID NO: 31812 - DNA, 1395 bp, synthetic construct
  source 1..1395: mol_type = other DNA; note = Synthetic coding sequence
atggaaccttcgtcacttgagttgccggccgacactgtgcagcggatcgcagcggagctgaaatgccatccgaccgacgagcgtgtggctctgcacctggacgaagaagataagttgagacacttccgcgaatgcttctacatcccaaagatccaggacctgccgccggtagacctttcactcgtgaacaaggatgaaaatgctatctacttcctcggcaattcattgggcctgcagccaaagatggtcaagacttatctggaggaggaactcgacaagtgggccaaaatcgcagcgtacgggcacgaggttggaaaacgcccgtggatcactggagatgaatcgatcgtggggcttatgaaggatatcgtcggtgccaacgaaaaagaaattgccctcatgaatgctctcaccgtcaacctgcacctgctgatgctctccttcttcaagccgacgccaaagcggtataagattctgctcgaggccaaggcttttccctcggaccattacgcaatcgagagccaattgcagctccacggccttaacattgaggagagcatgagaatgatcaagccgagggaaggcgaagaaacgctgcggatcgaggacatcctggaagtcatcgagaaggaaggagactcgattgcggtgattctgttctccggagtgcatttctacactggacaacatttcaacatccccgcaatcactaaagcaggacaggccaagggatgctacgtgggcttcgacctggcacatgccgtcggtaacgtggaactctatctccatgactggggagtggattttgcgtgctggtgctcatacaagtacctgaacgcgggagccggagggatcgcgggtgcttttatccacgaaaaacacgcccacaccatcaagcctgctctggtgggctggttcggacacgaactcagcacccgcttcaagatggacaataagctgcagctcatcccgggcgtctgcggtttccggatctccaatcctccaatccttctcgtgtgcagccttcatgcgtccctggagatcttcaaacaagcgactatgaaggcactccggaagaagagcgtgctgctgactggatacctcgaatacctgatcaaacacaactacggaaaagacaaggccgctaccaagaagccagtggtgaacattatcaccccaagccacgtcgaggagcgcggctgccagctcactattacttttagcgtgccgaataaggacgtgtttcaggagctcgaaaagcgcggggtggtctgcgataagcggaatccgaatggaatccgagtcgctccagtgcctctgtacaactccttccacgacgtgtacaagttcactaacctgctgaccagcatcctggattccgcggaaactaagaac

SEQ ID NO: 31813 - DNA, 1395 bp, synthetic construct
  source 1..1395: mol_type = other DNA; note = Synthetic coding sequence
atggaaccgtccagcctggagctccctgccgataccgtccagcggattgccgcggaacttaaatgccacccgactgacgagcgggtggcccttcacctcgatgaagaagataagctgcggcactttcgggagtgtttctacatcccgaaaattcaggacctgcccccggttgatctctcactggtgaacaaagacgagaatgccatctatttcttgggcaactccctgggactgcaacctaagatggtgaaaacctacctggaggaagagctggacaagtgggcgaagatcgccgcatacggtcatgaggtgggtaagcgcccgtggattaccggagacgaatcaattgtgggattgatgaaggacattgtgggagccaatgagaaagaaatcgcactcatgaacgcactgaccgtgaacctgcatttgctgatgttgtcgttcttcaagcccacgccaaaacggtacaagatcctcctggaagccaaggcctttccctcggatcactacgccattgaatcccaattgcagctccatggactgaatatcgaggagtctatgcggatgatcaagccacgcgaaggagaggagactctgcggattgaagatatcctcgaagtgatcgaaaaggaaggcgacagcatcgcggtcatcctgttctcaggcgtccatttctacaccgggcagcacttcaacattccagctatcactaaagcggggcaggccaaaggatgctacgtcgggtttgacctggcccacgccgtggggaatgtggagctgtacctccacgattggggagtggacttcgcgtgctggtgctcatacaagtacctgaatgcgggcgccggcggtatcgcgggcgccttcatccacgagaaacatgcccacaccatcaaaccggccctggttggttggttcggacacgaactcagcactagattcaagatggacaacaagctgcagttgatccctggagtctgcgggttccggatttcgaatccaccgatcctccttgtctgtagtctgcacgcctcgcttgaaatctttaagcaggccactatgaaggcgctgcgcaaaaagtcagtcctgctcactggatacttggaatacttgattaagcataactatggaaaggataaggcggcgaccaaaaagccggtcgtgaacatcattaccccatcgcatgtcgaggaacgggggtgtcaactgaccattaccttttccgtgccgaacaaggatgtgtttcaagaactcgagaaacgaggagtcgtttgcgacaagcgcaatccaaacgggatccgcgtagctccggtgcctctctacaactcgttccacgacgtgtacaagtttactaacctcctcaccagcattctggattctgccgaaaccaaaaac

SEQ ID NO: 31814 - DNA, 1395 bp, synthetic construct
  source 1..1395: mol_type = other DNA; note = Synthetic coding sequence
atggagccctcaagcctcgaactgccggcagacaccgtgcaacgcatcgctgcggaactcaagtgtcatccaaccgacgagagagtggccctgcatctggacgaagaggacaagctgaggcacttccgcgaatgtttttacatccccaagatccaggacttgccgccggtggacctgagtctggtgaacaaggacgaaaacgccatctattttctcggaaactcgcttggcctgcagccgaaaatggtcaagacctacctcgaggaagagctcgacaagtgggcaaagatcgcggcatacgggcacgaagtcggaaaaaggccatggatcactggagacgaaagcattgtgggactgatgaaagatatcgtcggcgcgaatgagaaggaaatcgctctgatgaacgcgctgaccgtcaacctgcatctcctgatgctcagcttcttcaagccgaccccgaaacggtacaagatcctgctggaagccaaggcattcccatcagaccactacgcgattgaaagccaactgcaactgcacgggctgaatattgaggaatccatgcggatgatcaagccacgcgaaggagaagaaactctgcgcatcgaggatatactggaggtgatagaaaaggagggagatagcattgccgtgatcctgttctccggcgtccacttctacactggccagcacttcaacatcccggcaatcaccaaggctggccaagcaaagggatgctacgtcggattcgaccttgcacacgccgtgggtaacgttgagctctaccttcatgactggggagtggattttgcctgttggtgcagctacaaatacctgaacgctggtgccggaggaatcgccggtgcttttatccacgagaaacatgcccacaccatcaagccagccctcgtgggttggtttggccacgaactgtcaactcggtttaagatggataacaaactgcagctgatccctggagtgtgcggcttccggatctccaacccaccgattcttctggtgtgcagcctccatgccagcctcgaaatctttaagcaggcgactatgaaggctctccgcaagaaatctgtgctcctcactggatacctcgaatacctgatcaagcataactatggaaaggacaaggcggccactaagaagccggtggtgaacataatcactcctagccacgtggaggagcggggatgtcagctcacgatcaccttctcggtgccgaacaaggatgtctttcaggaactggaaaagcgaggagtcgtgtgcgacaagagaaacccgaatgggatcagggtggcgccggtgcctctgtacaactcattccacgacgtctacaagtttaccaacctgttgacctccatccttgactccgctgagactaagaac

SEQ ID NO: 31815 - DNA, 1395 bp, synthetic construct
  source 1..1395: mol_type = other DNA; note = Synthetic coding sequence
atggagccgtcatccctggaacttccggccgacaccgtgcagcgcattgcggccgagcttaagtgtcacccaaccgatgagcgggtggcattgcatctggacgaggaggacaagctgagacactttagggagtgcttctatattccaaaaatccaggatctgccccctgtcgacctgagcctggtgaacaaagacgagaacgccatctacttccttggcaactccttaggattgcagcccaaaatggttaagacatatctagaagaagaactggataaatgggccaagattgccgcatatggacatgaagtggggaaaaggccttggatcaccggtgacgagagtatagtaggtttaatgaaggacatcgtcggtgctaatgaaaaggaaatagccctcatgaacgcattgaccgtgaacctacatctgctcatgctgtcctttttcaagccaacgccgaagcggtacaagattctcttagaggcgaaagctttcccttcagaccattacgcaattgaaagccaactacagttgcacggccttaatatagaggaatcgatgagaatgatcaaacctcgcgaaggcgaggaaactctgcggatagaagatatattagaggtcatagagaaggaaggagactccatcgcggtgatcttgtttagcggcgtccatttttatacaggtcagcattttaatattcccgctattacgaaagccggacaagctaagggttgttacgtggggttcgacttggcccacgcagtgggcaacgtcgagttgtacctgcatgactggggcgtggactttgcctgctggtgctcctacaagtatcttaacgccggggctggcggcatcgctggggcgttcatccacgagaaacacgctcatacgattaagcccgcattggtgggctggttcggccacgagctgtccacgaggttcaaaatggacaataaactccagctcattcccggcgtgtgtgggttccgaatttcaaacccgcctatactcttggtctgctcactacatgcgtcgttggagatcttcaagcaagctaccatgaaggctctgcgtaaaaaaagtgtgctcctgaccgggtacctggaatacctcatcaagcacaactacggcaaagataaggcagctacgaaaaagcccgtcgtaaatattatcaccccctcccacgtcgaagagcggggctgccagctcacaataacattctccgtcccaaacaaagatgtgttccaagaactcgagaagcgaggcgtcgtttgcgacaagaggaatccaaacgggatcagggttgcccctgtcccactatacaacagtttccacgatgtttacaagttcacgaacttactgaccagcattctcgactccgccgagactaaaaat

SEQ ID NO: 31816 - DNA, 1395 bp, synthetic construct
  source 1..1395: mol_type = other DNA; note = Synthetic coding sequence
atggagccgagttccctggaacttcctgcggatactgttcaacgaatcgcagcggagctgaaatgccacccgacagatgaacgggtggccttgcacctggacgaagaggataaactccgccacttcagagagtgcttctatatccctaaaatccaggatttaccgcccgttgatttgtctctggttaataaagacgaaaatgctatttatttcctaggcaactcgttggggctccagcccaagatggtcaagacctatcttgaggaagagttggacaaatgggccaagatcgcggcctacggtcatgaggtgggcaaacggccatggattacaggggatgagtctatcgtgggtcttatgaaagacatcgttggagcgaacgagaaggaaatcgctcttatgaatgcactcaccgtgaacctccacctgctaatgctaagctttttcaaaccaacccccaaacggtataagattctcctggaggctaaggcatttcccagtgatcactacgcaatcgaaagccagctccagctgcacggtctcaacatagaggagtcaatgcgcatgattaagcctcgcgaaggggaagaaaccctgcgtatcgaggatatattggaagtgattgaaaaagagggggattccattgccgtgatcttgttctccggtgtccacttttatacaggccaacattttaacataccagcaatcaccaaagcagggcaggctaaaggatgctatgtgggatttgatctggcacacgccgtcgggaacgtcgagctgtacctgcacgactggggcgtggacttcgcctgctggtgctcgtataagtaccttaacgctggtgccggtggaattgccggggcctttattcacgagaaacacgctcacaccattaagcccgcactcgtggggtggttcggccacgaactcagtactcgtttcaaaatggataataaactccaattaatcccaggcgtatgtggctttcgcatatccaatccaccaatattgttagtgtgttccttgcacgccagcctggaaatcttcaaacaggccacgatgaaggccctgcggaaaaagtccgtcttgttaactgggtacctcgagtacctcatcaagcataactatggcaaggataaggctgctaccaagaaaccagtggttaacatcattacacctagccatgtcgaggaacggggatgtcagctgacaatcactttttctgtgcctaataaggacgtctttcaggagcttgagaaacgtggagtcgtgtgtgacaaacggaatccaaatggtataagagtggcccctgttcccctgtacaattctttccacgatgtttacaagtttacaaacttactgacttctatcctcgattcagctgagaccaagaat

SEQ ID NO: 31817 - DNA, 1395 bp, synthetic construct
  source 1..1395: mol_type = other DNA; note = Synthetic coding sequence
atggaaccgtctagcttggagctgccggccgacacagtgcaaaggattgccgcagaactgaagtgccaccctacggatgaacgagttgcgctgcacctcgacgaggaagacaagcttcgccacttccgtgagtgcttttatatcccgaagattcaggatttacctccggtggatctttcgctggtgaacaaagacgagaatgccatttatttcctgggtaatagcctggggttgcagcctaagatggtcaagacgtacttggaagaggagttggataaatgggctaagattgctgcttatggtcacgaagtgggcaaacgaccctggatcaccggagatgaaagcatcgtgggtcttatgaaagacattgttggagcgaacgagaaagagattgcactgatgaacgccctgaccgtgaatctgcacctgctcatgttatcctttttcaaacctacccctaaacgatacaaaatactgctagaggctaaagctttcccgagcgaccattatgccatcgagtcgcaattacagctgcatggccttaacatcgaggagtccatgcgcatgattaaaccgcgagaaggtgaggaaaccctgcggatcgaggacatcctggaggtgatcgagaaagaaggggactccatagcagtcattctcttcagcggggttcacttttatacgggtcagcatttcaacattccagccatcacgaaagcaggccaagctaagggttgctatgtgggttttgatctggcacacgccgtgggcaacgttgagctgtaccttcatgattggggagtggactttgcatgctggtgctcctataaatatctgaatgccggagccgggggcatcgctggtgcctttatccatgaaaagcatgcacacaccatcaagcctgctttagttggctggtttgggcatgaactgtctacccggttcaaaatggataacaagctgcagctgatcccgggtgtgtgcggtttccggatttccaatccgcctattctgctggtttgctccctgcacgcaagcctcgagatcttcaagcaggcaaccatgaaggcgctgcgcaagaagagcgtcctcctgaccggttatctggagtatctgattaagcacaattacggtaaagataaggctgctaccaagaaaccggtcgttaacatcattactccttctcacgtggaagagcgaggttgccagctgacgattacctttagcgtaccgaacaaagacgtgtttcaggagctggagaaacgcggtgtggtttgtgacaagaggaacccaaacggaattcgcgtggcgcctgtgcctctgtataacagcttccacgatgtgtataaattcaccaatctgttgaccagcattctggattctgcggaaaccaaaaac

SEQ ID NO: 31818 - DNA, 1395 bp, synthetic construct
  source 1..1395: mol_type = other DNA; note = Synthetic coding sequence
atggaaccctcatctcttgagcttccggccgacacggtgcagcggatcgccgcagaacttaagtgccaccctacagatgaaagagttgcccttcacttagatgaagaagataaactgagacacttccgagaatgtttttacataccgaaaatacaagacctaccacccgtagatctgagcctagtcaataaggatgagaacgctatctacttccttggcaattctctggggttgcagcccaagatggtgaaaacatatctcgaagaagagctcgataaatgggcgaagatcgcggcctacggacacgaggtgggcaagaggccatggataaccggagacgagtcaattgttggcctgatgaaggatattgtgggcgcgaatgagaaggaaattgccctaatgaatgcgctaacggttaatctgcacctactcatgctatcgttctttaagcccacacccaaacgttacaaaatccttctcgaggccaaagcatttccgtccgaccactatgccattgagagtcagctgcagctacacggtttaaacatcgaggagagcatgagaatgataaaaccaagagaaggagaggagaccctacggatcgaagacatactggaggtgatagaaaaggaaggcgattcaatcgctgttatcctgttctccggagtgcacttttacactgggcagcatttcaatatccctgcaattaccaaggcaggtcaggctaaaggatgctacgtgggttttgacctcgcccacgcagtcgggaatgtggagctctacctccacgattggggtgtcgattttgcttgctggtgtagctataaatacctcaatgcgggggccggaggcatcgcaggagctttcatccatgaaaagcacgcgcacaccattaagcccgcattagtggggtggtttggacatgaattgtcaaccagattcaagatggataacaagcttcagctcataccaggtgtgtgtggattccgaatctctaatcctccaatattactggtgtgctctctccatgccagtctcgaaatattcaagcaggccacaatgaaagcactgcggaagaaaagtgttcttttgacgggttatctcgaatatctgattaaacacaattacggcaaggataaagcagcgacaaaaaaacccgtggtaaacatcatcacccccagccacgtggaagaaagaggatgccagctcactataacattcagcgtacccaacaaggacgtgttccaggaacttgaaaaaagaggcgtggtatgtgataaaagaaatcccaacggaatcagggttgccccggtcccgctatataactcgtttcatgatgtgtacaagttcacaaatctcctgacgagcattctggattctgccgaaactaagaac

SEQ ID NO: 31819 - DNA, 1395 bp, synthetic construct
  source 1..1395: mol_type = other DNA; note = Synthetic coding sequence
atggaaccgtcaagcttagaacttccggcagatacagtccaaagaatcgccgcggaacttaaatgtcatcctacagatgagcgagtggcgcttcacttggatgaagaagacaagcttcgacactttagagaatgcttttacatcccgaaaattcaagatcttccgccggtggatttgtcattagttaataaagatgaaaatgcgatctatttcctggggaattctctgggtctgcagccgaagatggttaagacatacttggaagaggaactcgataagtgggcgaaaattgcagcgtacgggcatgaagtgggcaagagaccatggatcacgggagacgagtccattgtaggattgatgaaagatattgtcggagcgaacgagaaagaaatcgcacttatgaacgcccttacagtaaatcttcacttactcatgttgagcttttttaaaccgactccgaaacgttataagatattgctcgaagcaaaggcatttccatcggatcattatgctatagagagccagttacagttgcatggactcaatatcgaagaaagtatgcgcatgataaagccccgcgagggagaggaaactttacgaatcgaagatattttagaagtgattgagaaagaaggcgactctattgcggtaatcttgttttctggcgtacatttttatacggggcagcatttcaacattcctgccataacaaaagcgggacaagcgaaagggtgctatgtgggatttgatctggcgcatgcagtcggcaacgtagaactgtacctgcatgactggggtgttgactttgcttgttggtgctcatacaaatatttaaacgctggagctggcggtattgcgggcgcttttatccacgagaaacatgctcatactattaaacccgcattggtaggctggtttgggcatgaactgagtacacgctttaagatggacaacaaactccagttgatcccaggcgtttgcggctttcgaattagtaatccccctatcttattggtctgttccttacatgcgtcattagaaatttttaaacaggcgactatgaaagcgctgcgcaaaaaatcggttctgcttacaggttaccttgagtacttaattaaacacaactatggcaaagataaagcagctacgaaaaaaccggttgtgaatatcatcaccccttcccacgtcgaggaacgaggatgtcagttaacgattacgtttagcgttccgaacaaagacgtgtttcaggagcttgaaaagaggggggtcgtctgtgataagagaaatccgaatggtattagagttgcaccagtgccactttataactcgttccatgatgtgtacaaattcacgaatctgctcacatcaattcttgattcagcagagacaaaaaat

SEQ ID NO: 31820 - DNA, 1395 bp, synthetic construct
  source 1..1395: mol_type = other DNA; note = Synthetic coding sequence
atggaaccgtcgtcccttgagctgcctgcagacactgtgcaacggattgctgctgaactgaagtgtcatcctactgacgagcgcgtggcgcttcacctggacgaagaggataaacttcgtcacttcagagaatgtttttacattcctaaaatccaggatcttccccccgtcgaccttagcctggtgaacaaggacgaaaatgccatctacttcctcggcaattcgcttggacttcagcctaaaatggtcaagacctaccttgaggaggaactggataagtgggccaaaattgcggcttatggccacgaggtgggcaaacgcccgtggattaccggggatgaatctatcgtgggtttgatgaaggatatcgtgggagcaaacgaaaaggaaatagccttgatgaatgcactcactgtaaacctccatttgttgatgctgtcgttctttaagcccaccccaaaacgttacaaaatacttctggaagcaaaggcatttccaagcgaccattacgcaatcgagtctcaacttcaactgcatgggctgaatattgaggaatcgatgcgaatgataaagcctagggagggagaagaaacgcttcggatcgaggatatccttgaggtgatcgagaaggaaggggactcaatagctgtgattctcttttcgggcgtgcatttctacacgggacaacatttcaacatccctgcaattaccaaggcgggccaagcaaagggttgttacgtgggctttgacctcgcccatgccgttggaaacgtcgaactgtaccttcacgattggggtgtcgattttgcatgttggtgtagctataagtacctcaatgcaggtgccggaggcattgcaggggctttcatccacgaaaagcacgcccatactataaagccagcactggttggttggtttggacatgaactttctactcggttcaagatggataacaaacttcagctgattccaggagtctgcggttttagaatttccaaccccccaatcctgctcgtatgctcactgcatgcctcccttgagatattcaagcaagctaccatgaaggcattgagaaagaaatcagtactgctcacgggatacctggagtacctgattaagcacaactacggaaaagataaagcagcaaccaagaaaccagtggtgaacatcattaccccgtcgcatgtggaggaaagaggatgccagcttactattaccttttcagtccctaacaaggatgtgtttcaggaactcgaaaagcgtggcgtggtctgtgacaagcgcaaccccaatggcattcgcgtggcacctgtccctctgtacaattcctttcacgatgtgtataagtttaccaatcttcttacctcaattctggattcggcggagactaagaac

SEQ ID NO: 31821 - DNA, 1395 bp, synthetic construct
  source 1..1395: mol_type = other DNA; note = Synthetic coding sequence
atggaaccgtcctcccttgagctgccagctgacaccgttcaaagaattgctgcagagctgaagtgccaccccacagatgaacgggtagcactgcacctggatgaagaagataagcttagacattttcgggaatgtttttacatacctaagatccaagacctgccgccagtcgacctgtcactggtcaataaggatgaaaatgcaatctattttctgggaaactccctcgggctccagcctaaaatggtaaaaacgtacctcgaggaagagctagataagtgggctaagattgctgcctacggccacgaggtgggcaaacggccatggattaccggggatgagagcatagtgggcctgatgaaggacattgtgggagcaaacgaaaaggagattgccctgatgaacgcgcttaccgtgaatttgcatttgttgatgttgtcatttttcaagcccactcccaagcgctataagatcctgctcgaggctaaggctttccctagcgaccactacgccatcgaatcgcagctgcaactccatgggctcaacatagaagaaagcatgcgaatgattaagcccagggagggcgaagagacgctaagaatcgaggatattcttgaagttattgaaaaggaaggcgacagcatcgctgtgatcctcttcagtggggtgcacttctacaccggccagcactttaatatccctgcgattacaaaggctgggcaagccaagggctgttatgtgggtttcgaccttgcccacgccgtcggcaatgtggagctgtacctccacgattggggagtcgatttcgcttgctggtgtagctataagtacctgaatgcgggcgctggcggcatcgccggcgctttcatacacgagaagcatgcccataccatcaagccagctctggtggggtggtttggccatgaattatccacacgcttcaagatggacaataagctgcagctcattcctggagtgtgtggattcaggatatccaatccccctatccttttggtgtgttccctccatgcatcgctcgagattttcaagcaggcaactatgaaggcactccggaaaaagtccgttctgctgacaggatatctcgagtaccttattaagcacaactatggcaaggacaaggccgccacaaaaaagccagtggtcaacattatcacccctagtcatgtcgaagagagagggtgccagctcactatcaccttttcagtgcccaacaaggatgtcttccaggagctggagaaacgcggcgtggtctgcgataagaggaaccctaacggaattcgcgtcgcaccggtgcctctgtacaattcatttcacgatgtctataaattcacgaatctgctgacatccattctcgacagcgctgaaacaaagaac

SEQ ID NO: 31822 - DNA, 1395 bp, synthetic construct
  source 1..1395: mol_type = other DNA; note = Synthetic coding sequence
atggaaccttcttcattggaactccctgctgacactgtgcaaagaatagctgctgaactcaagtgtcatcctacggatgaacgcgtggcgctgcatctggatgaggaggacaagttgagacacttcagagaatgcttctacattccaaagattcaggacttgccaccagtggatctgtcgcttgtgaacaaagacgagaacgcaatttactttttggggaatagccttggcctgcaaccaaagatggtgaaaacgtaccttgaggaagagcttgacaagtgggccaaaatagccgcatacggccatgaagtcgggaaaagaccctggattactggtgatgagtcaattgtgggactcatgaaagatatagtgggtgcaaacgaaaaggaaattgcgctgatgaatgccttgaccgtcaatctccacctgctgatgctgtcgttctttaaaccgacccccaagagatacaaaatacttctggaagcgaaggcattccccagcgatcactacgcaattgagtcgcagctccaacttcatggtcttaacatagaggagtcgatgagaatgatcaaacccagggagggagaggaaaccctgcgaattgaagatattctggaggtcattgaaaaggagggtgactccatcgcagtgattttgttttccggggtccatttctacaccgggcagcatttcaatattccagcaattaccaaggcaggccaggcaaagggatgctatgtgggatttgatctcgcacatgcagtgggtaacgtggagttgtacttgcacgactggggcgtcgatttcgcatgctggtgttcctacaaatatcttaatgcaggggcaggtgggatcgccggagcgtttatccatgaaaagcatgcacacactattaagcctgcactggtgggatggtttggacatgaactgagcacccggtttaagatggacaataaactccagctgatccctggggtgtgtggttttagaatttcgaacccaccgatcttgctcgtgtgttcacttcacgcctccctggagattttcaagcaagccaccatgaaggccctccggaagaaatccgtgcttctcaccggataccttgagtacctcataaagcacaattatggaaaggataaggcagccacgaagaagccagtggtaaacatcataacgccgtcacacgtcgaagagcggggatgtcagcttacgatcactttttcggtgccgaacaaggatgtctttcaggagcttgaaaagcgaggtgtggtgtgcgataagcgtaatcctaacggaatccgggtggctcctgtgcctctgtacaattcgtttcatgatgtctacaagtttaccaaccttctcacttcaattttggactcagcagaaaccaagaac

SEQ ID NO: 31823 - DNA, 1395 bp, synthetic construct
  source 1..1395: mol_type = other DNA; note = Synthetic coding sequence
atggagccatcctcgctggaacttcctgcggacaccgtgcagcgcatcgccgcggaacttaagtgtcatccgaccgacgagagagtggcgctccatcttgacgaagaagataagctccggcattttagggaatgcttctacattcctaagatccaggaccttccaccagtcgatttgtcgctggtgaataaggacgaaaacgcgatttactttcttggaaactcccttggactgcaaccaaagatggtcaaaacttacctcgaagaagaacttgacaagtgggcaaagatagcagcatacggacatgaggttggtaagaggccatggattaccggagatgagtctatcgtgggccttatgaaggatattgttggtgccaacgaaaaagaaatcgctctcatgaacgcacttactgtgaatctgcaccttctgatgttgtcgtttttcaaaccgacccctaagcggtacaagatcctgttggaagcaaaggcgtttccatctgatcattacgcaattgaatctcaactgcagctccacggtcttaacatcgaagaaagcatgagaatgatcaagccaagagagggcgaggaaacccttcggatagaagatattctggaagtgattgaaaaagagggtgattctatcgctgtcatactgttttcaggagtccatttctacactggacagcactttaacattccagcgatcaccaaagcaggacaagcaaagggttgctacgtgggatttgaccttgcccacgcagtcggtaacgtggagctgtacctgcatgactggggggtcgattttgcctgttggtgttcctataagtacctgaacgcaggggcaggcggcatagccggagcattcatacacgagaaacacgcccatactataaagccagcacttgtcggatggtttggacatgaactgagcactcgcttcaagatggataacaaactccagcttattcccggagtgtgcggcttccgcatttcaaatcctccaatccttttggtgtgtagcctccatgcatcgcttgaaatctttaagcaggcaactatgaaggcactgcgcaagaaatcggtgctgctcaccggctacctggagtacctgattaagcacaattacggcaaggataaggcagccactaaaaagcccgtggtgaacataatcactccttcgcatgtggaagaacggggctgtcaactgaccatcactttctcagtgcctaacaaagatgtgtttcaagagctggaaaagagaggggtggtgtgtgataagaggaaccctaatggcattcgtgtggcgcctgtgccgctgtacaattcattccatgatgtttacaagtttactaacttgctgacttcgatccttgattcggcagagacgaagaac

SEQ ID NO: 31824 - DNA, 1395 bp, synthetic construct
  source 1..1395: mol_type = other DNA; note = Synthetic coding sequence
atggaaccgtcgagtttggaattgcctgcagacacagtgcaacgtatagcagctgagctcaagtgtcatccgacggatgagcgtgttgcactgcacctagatgaagaggacaagctcagacattttagagagtgtttctatattccaaagatccaagatttgccacccgtagatctttctctagtaaacaaggacgaaaacgcaatatatttcctcggaaattctcttggactgcaaccaaagatggttaaaacctaccttgaagaggagctcgataagtgggcaaagattgcagcgtatggccacgaagttggtaaacgtccttggattacaggagacgagtcaatagttggattgatgaaggatattgttggagctaacgaaaaagaaatcgctctaatgaatgccttaactgttaacctccatttgcttatgctttccttctttaagccaactccaaaaaggtacaagatccttctcgaggctaaggcttttccatcggatcactacgcgatcgaaagccagttacagctgcacggacttaatattgaggagtcaatgcggatgattaagccaagagaaggagaagaaactttacgtatcgaggatattcttgaagttattgagaaggagggcgactcaatcgctgtaatcctattctcaggtgtccacttctatacgggacaacactttaacataccagctataacaaaagctggacaagcgaaaggatgttacgtcggattcgatcttgcacatgctgtcggaaacgttgaactctacctccatgattggggagtagactttgcttgctggtgtagttataaatatttgaatgccggtgcaggaggcatagctggagcttttatacatgagaagcacgcgcacacaatcaaaccggcgttagtgggttggttcggtcatgagctgtcgaccagatttaagatggataacaagcttcagctgataccaggagtctgcggttttcggatcagtaacccaccgatactgctagtctgttcacttcatgcttctctggaaatcttcaagcaggccaccatgaaggcattacgaaaaaaatcagttcttttaaccggttacctcgaatatcttatcaaacataattacggtaaagacaaggcagcaactaagaagccagttgtgaacattatcactccatcacacgtagaagagcgcggatgtcaactaaccattacgttctcagttccgaacaaggacgtttttcaggaacttgaaaaaagaggagtagtatgtgataaacgaaaccccaatggaattcgagtagcccccgttccattatacaattcattccacgacgtctataaattcaccaatcttctaacttcaattctcgactcagccgagacaaaaaat

SEQ ID NO: 31825 - DNA, 1395 bp, synthetic construct
  source 1..1395: mol_type = other DNA; note = Synthetic coding sequence
atggaaccatcgtccctggaactccccgccgatactgtgcaaaggatcgcggccgagcttaagtgccaccccacggacgagcgtgtcgctttgcatctggacgaagaggacaagctgcggcacttccgcgagtgcttctacatcccgaagatccaggatcttccaccagtggacctcagtctcgtgaataaggacgagaatgccatttactttctgggcaattcgttgggactgcagccgaagatggtcaagacctacctggaagaggagctggacaaatgggccaaaatcgccgcatacggacatgaagtgggaaaacgcccatggatcactggagacgaatccatcgtcggactgatgaaggacatcgtcggagccaacgaaaaggaaatagccctgatgaacgcgctgactgttaacctgcacttgctcatgctctcctttttcaaaccaacccctaagcggtacaaaatcctgctggaggccaaggcgttcccttctgatcattacgcaatcgagtcacaactccaactgcatggcctgaacatcgaagagtccatgcgcatgatcaagccaagagagggagaggaaacccttcgtatcgaggacatcttggaggtgatcgaaaaagagggagacagcatcgcagtgatcctgttctctggagtgcatttctacacgggacagcacttcaacatcccggccatcacgaaggccggccaggcaaagggatgttacgtgggattcgacctggcccatgcagtggggaatgtggagctttacctccacgattggggagtggacttcgcctgctggtgctcctacaagtacctgaatgcaggtgccggaggaatcgctggggcgttcatccatgaaaaacacgcccacaccatcaagcctgctctggtgggctggttcggccatgaactgtccacccgctttaagatggacaataagctccagctcatcccaggggtctgcggctttcggatctcaaatccgccaatccttctggtgtgcagcctccacgcgtccctggaaatcttcaagcaggccacgatgaaggcgctgcggaaaaagtcagtgctcctgaccggatacctcgagtatctcatcaagcataactacggaaaggacaaggcggctactaaaaagccggtcgtcaatatcatcaccccgtcccacgtggaagaaagagggtgccaactgaccataactttctcggttccgaacaaggatgtctttcaggaattggaaaagcgcggagtcgtctgcgacaaacgcaatccaaacggaattcgggtggccccggtgccgctgtataactcgtttcacgacgtctacaaattcaccaacctgctgacctcgattctcgattcggctgagactaaaaac

SEQ ID NO: 31826 - DNA, 1395 bp, synthetic construct
  source 1..1395: mol_type = other DNA; note = Synthetic coding sequence
atggagcccagctctctggaactcccagctgataccgtgcagagaattgcagcagaactgaagtgccaccctactgacgagagggtggccctccatctggatgaggaggataaacttagacactttcgcgagtgcttctatatcccaaagatccaagatctgccacccgtagatctgagtttggttaacaaagacgaaaacgcaatctactttcttggcaattcacttggcctgcaacctaagatggtcaagacttacctcgaagaggaacttgacaaatgggcaaaaattgcagcgtacgggcacgaggtggggaaacgcccttggattaccggggatgaaagcatcgtgggattaatgaaagacatcgtaggcgcaaacgagaaggaaattgctcttatgaatgccctcactgttaaccttcacttactgatgctgtcattttttaaacctaccccgaagagatacaagattctgttggaggcaaaagcattccccagcgatcattacgccatcgaatcccagctccaactccacggattgaatatcgaagagagtatgaggatgatcaaaccacgcgagggggaagaaactctcagaatcgaagatattcttgaagtgatcgagaaagagggagatagtattgcagtcatcctcttctcaggcgtccatttctacaccggccagcattttaacatcccagccatcactaaagctggccaggcaaagggttgctacgtcggcttcgaccttgcccacgcggtcggcaatgtcgagctttatctgcacgattggggcgtcgattttgcttgttggtgcagctataagtacttgaatgcgggagcgggagggatagctggcgccttcattcacgagaaacacgctcacacgattaagcccgcattggtcggatggtttggccatgagctgagtacacgtttcaagatggacaacaaactgcagctgattccaggcgtctgtggcttcagaatcagcaaccccccaattctacttgtctgtagcctgcatgcttcattggagatctttaagcaggctacaatgaaggccctccgcaaaaaaagtgtcttgctcaccggctatctggagtacctgatcaagcacaattatggcaaagataaagctgcgacaaagaagcccgtggttaatattattacaccatcccatgtggaggagagaggatgtcagctgaccatcactttctccgtgccgaacaaggatgttttccaggagttggagaagaggggggttgtgtgtgacaagaggaaccctaacggcatcagagtcgcccctgtgcctctgtacaactcttttcacgacgtgtataaattcaccaacttactgacatcaatccttgattccgctgagaccaaaaac

SEQ ID NO: 31827 - DNA, 1395 bp, synthetic construct
  source 1..1395: mol_type = other DNA; note = Synthetic coding sequence
atggagccaagcagccttgagctccctgcggacactgtgcagcgcatcgccgcggaactgaagtgccacccaaccgatgagcgggtggccctgcatttggatgaagaggataagttgcgccactttagggagtgtttttacatcccaaagatccaggacctgcccccggtggacctcagtctcgtgaacaaagatgaaaacgccatctactttcttgggaacagccttggactgcagccgaagatggtcaagacctaccttgaggaagagctcgacaaatgggccaaaatcgctgcctacggtcatgaagtcggcaagcgaccgtggataaccggagatgaatcgatcgtcggactgatgaaggacatcgtcggtgccaacgagaaggagatcgcgttgatgaacgcgctcactgtgaacctgcatcttctgatgttgagctttttcaagccgactccgaagagatacaaaatcctgttggaagctaaggcattcccaagcgaccattacgcaatcgagtcgcagctccaactgcatggccttaacatcgaggaatcaatgcggatgatcaaacctcgcgaaggtgaggagactctgcggatcgaagatattctggaagttattgagaaggaaggggattcgatagccgtgatcctgttttcaggcgtgcacttttacacgggccaacatttcaatattcccgcgattactaaagccggacaggcgaagggatgctacgtggggttcgacctggcccacgccgtcggcaatgtggagctgtacctgcatgactggggggtggattttgcctgctggtgctcgtataagtacctgaatgccggcgccgggggtatagcaggagcattcatccacgagaaacacgcacacactataaagccggccctggtcggatggttcggacatgagctgtcaacccgcttcaagatggacaataagctccaactgatccctggagtctgcggatttaggatcagcaatcccccgatccttctcgtctgtagcctgcacgcctccttggaaatcttcaagcaggcgaccatgaaagccctgcgcaagaagagcgttctgctgaccggctatctcgaatacctgatcaaacacaactacggaaaggataaggcggctacgaagaagccggtggtcaatatcatcaccccgagccacgtggaagagcgcggctgccagctcacgattactttctccgtgccaaacaaggacgtgttccaagaactcgaaaagcggggagtggtgtgcgacaaaagaaacccgaatgggattcgagtggcacccgtcccactgtacaactcgttccacgacgtgtacaagtttaccaatctgctgacgtcgatccttgactccgccgaaactaaaaac

SEQ ID NO: 31828 - DNA, 1395 bp, synthetic construct
  source 1..1395: mol_type = other DNA; note = Synthetic coding sequence
atggaaccatcgtctcttgagctgccggccgacactgtccagcgcatcgcggccgaactcaagtgccatccaactgatgagcgcgtggccctgcacctggatgaggaagataaactcagacacttccgggagtgtttctacattcctaagattcaagacctccccccggtcgatctgtcgctggtgaataaagacgaaaacgcgatttacttcctcggaaacagcttgggactgcagcctaagatggtgaaaacctacctggaagaagagctggataaatgggccaaaatcgccgcctatggtcatgaggtgggtaagcggccgtggatcacgggagacgagtcaatcgttggactcatgaaggacattgtgggagcaaatgaaaaggagatcgctctgatgaacgccctgaccgtgaatctccatctcctgatgttgagctttttcaagccgactccgaagcggtacaagatcctcctggaagcaaaggcatttccgagcgaccactacgcgatcgaatcccagctgcagttgcatggacttaatatcgaggagtcaatgcgcatgatcaagccccgagaaggagaagagactctgaggatcgaggacatccttgaagtcatcgaaaaagagggtgactccatcgctgtgatcctgttctcgggagtccacttctacactggccaacattttaacatcccggcgatcaccaaggctgggcaggctaaggggtgctacgtcggattcgacctggcacacgccgtggggaatgttgaactttacctgcacgattggggagtggacttcgcctgctggtgctcgtacaagtacctgaatgccggggcgggcggaattgcaggagctttcatccacgaaaagcatgcgcatactatcaaaccagcactcgtgggctggttcggccacgaactgtccacccgctttaagatggataacaaactgcaactgattccgggtgtgtgtggatttcgcatctccaacccgccaatcctcctcgtgtgttcgctgcatgcgtcactggaaatcttcaaacaggccaccatgaaggccttgagaaaaaagtcggtgctcctcaccgggtacttggaatacctgatcaaacacaactacggcaaggacaaggctgcgactaagaagccggtcgtgaacatcattactccttcccacgtggaggagcggggatgccaactgaccatcacgttttccgtgccaaacaaggatgtgttccaggagctggaaaagcggggcgtcgtgtgcgataaaagaaaccctaatggcataagggtggcacccgtcccactctacaacagcttccacgacgtctataagttcaccaacctgcttaccagcatcctcgactcagccgaaaccaagaac

SEQ ID NO: 31829 - DNA, 1395 bp, synthetic construct
  source 1..1395: mol_type = other DNA; note = Synthetic coding sequence
atggaacccagttctctggaactgcctgcagatacagtgcagaggatcgctgccgagctgaagtgccatcccaccgacgagagagttgcactccatttggacgaggaggataaactgaggcactttcgggaatgtttctacattcccaagattcaggacctcccccccgtcgacctcagtctggtcaacaaagacgagaacgccatttacttcttggggaacagtctgggactgcagccaaagatggtgaagacatacttggaagaagagttggataagtgggctaaaatcgcagcttacgggcatgaggtcggtaagcgcccctggatcaccggcgacgaaagcatcgtggggctgatgaaggatatagtgggcgcaaatgaaaaggaaattgccctgatgaacgcactgacggtcaatctccatctgctgatgctgtccttttttaaaccaactcccaagcggtataagatcctcctggaggccaaggcctttccaagcgaccactacgccatagaatctcagctccagttgcatggcctcaatatcgaggagtcaatgagaatgattaagcctcgagaaggggaagaaaccttgcgcatagaggacatcctggaggtgattgagaaagagggggattccattgccgtcatcctgttttccggcgtccacttttacacgggacaacattttaacatcccagccatcacaaaggccggacaggcaaaggggtgttacgttggctttgacctggcccatgcggtcggtaacgtagagctgtacctgcatgactggggagtggactttgcctgttggtgctcttacaaatatctcaacgccggagcaggagggatcgcaggagcttttatccatgagaagcacgctcacacaatcaagccggccctcgtaggatggtttgggcatgagctctccacccggtttaaaatggataataagcttcaactcatccctggggtgtgtggctttcgcattagtaaccctcctatcctgttggtatgcagcctccatgcctctctggagatcttcaagcaggcaacgatgaaggccctcagaaaaaaaagcgttttgctcaccgggtatctggagtacttgatcaaacataactatggcaaggacaaggccgccaccaagaaacctgtcgtaaacataataactccctctcatgtagaagaaagaggatgtcaattgaccatcacattttcagtacccaacaaagacgtcttccaggagctggagaagcggggggtcgtgtgcgataaacggaaccccaacggtatcagagtcgcccccgttccactgtacaattcttttcacgacgtttacaagttcacaaatctgctgacaagtatccttgactccgcagaaacaaagaac

SEQ ID NO: 31830 - DNA, 1395 bp, synthetic construct
  source 1..1395: mol_type = other DNA; note = Synthetic coding sequence
atggagccatcatcactggagctgcccgcagataccgtccagcgcatcgccgcagaactcaaatgtcaccctacagacgagcgagtcgccctgcatctcgatgaagaggataagctaaggcatttccgtgaatgcttctatataccaaaaatccaggatctcccacctgtcgacctgtctctcgttaacaaagatgaaaatgcgatttattttctcggtaatagtcttgggcttcagcctaagatggttaaaacatatcttgaggaagaactggacaagtgggccaagatcgctgcgtatggtcacgaggttggcaaaagaccatggataacgggtgacgagtcaattgttggtttgatgaaggacattgtgggagcgaacgaaaaggagattgccctgatgaacgctttgacggtgaatctgcatctgctgatgcttagcttctttaagcccactcctaaaaggtataagatcctcctggaagcaaaggctttcccctccgaccactatgcaatcgagtctcagctgcaactgcatggacttaatatcgaggagtctatgagaatgattaaaccacgagagggcgaggaaaccctccggattgaagacatcttggaggtcatcgagaaagaaggtgactccatcgccgtgatcctgttcagcggcgtacatttctacacgggacagcacttcaacatccctgcgatcacaaaagccgggcaagcaaaaggatgctatgtgggctttgatctagcccacgcagtcggcaatgtcgagctgtatctccatgattggggagtggatttcgcctgctggtgcagctacaaatacctcaatgctggcgccggcgggattgcgggggcattcattcatgaaaagcacgcccacaccatcaaaccggctctcgtaggctggttcgggcatgagcttagcaccaggtttaagatggacaacaagctacagctgatccctggggtgtgtggctttcgaatctccaatccacctatcctactggtgtgtagcctgcacgccagtctcgagatctttaagcaggccacgatgaaagctttgcggaaaaagtcagtgctcctaactgggtatttagaatacctcatcaagcataattacggcaaggataaggctgctaccaaaaaacccgttgtgaacataattacaccttcacatgtcgaggagagagggtgtcagcttacaattactttttcagttccaaataaggatgtattccaagaactggaaaagaggggagtggtttgcgacaaacggaatcccaacggaattcgcgtagcaccagtgcctctctataactccttccatgacgtgtataaatttactaacctcctgactagtatcttggattccgcggagacaaaaaac

SEQ ID NO: 31831 - DNA, 1395 bp, synthetic construct
  source 1..1395: mol_type = other DNA; note = Synthetic coding sequence
atggagccgagctccctggagctccctgcagataccgtgcagagaatcgctgcagaacttaagtgtcaccctactgatgagcgcgtggcgctccatctcgacgaagaggacaagctgcggcactttagggaatgtttctacatcccgaagatccaggacctcccgccagtggacttgtcgctcgtcaacaaagatgaaaacgcgatttacttcctggggaacagcctgggactccagccgaagatggtcaagacttatctggaggaggagctcgacaagtgggcgaagatcgccgcatacggtcatgaggtgggaaagcgcccctggatcacgggagacgaatccatcgtgggactgatgaaagatatcgtcggcgcaaacgaaaaggaaatcgcgctgatgaacgcgctcacggtcaatctccacttgctcatgctgtcttttttcaaaccgaccccgaagaggtacaaaatcctgctggaagccaaagcgttcccaagcgaccattatgcaatcgaatcccagctgcagttgcatggactgaatatcgaagagtcgatgcggatgattaaaccaagagaaggagaagaaactctcaggattgaggacatcctcgaggtaatcgagaaagagggcgacagcattgccgtcatcctgttctccggagtgcacttctacaccggccagcactttaacataccggccattaccaaggccgggcaggcaaaaggctgctacgtcgggttcgacctggctcacgccgtcggaaacgtggagctgtatctgcacgactggggggtggatttcgcgtgttggtgctcgtacaaatacctgaacgcaggagcgggaggaatcgcgggcgcgttcattcatgagaaacacgcccataccattaagcccgctctcgtgggatggtttggccacgaactgtccacccgctttaagatggacaacaagctccagctgattccaggtgtgtgcggatttcgcatctccaacccacccatcctgcttgtctgctccctccacgcctcattggaaatctttaagcaagcaaccatgaaagccctgcgaaagaaaagcgtgcttctgaccgggtacctcgaatacctgatcaagcacaattacggaaaggacaaggccgcgaccaagaagcccgtcgtcaacatcatcactccgagccacgtggaggagcgcggatgccagctgactatcaccttttccgtgccgaataaggacgtgtttcaggagctggaaaagcggggcgtggtgtgcgataagcgcaatccgaacggaattcgggtggcgcctgtgccattgtacaattccttccacgatgtctataagttcaccaacttgctcactagcatcctggattccgcagagactaaaaac

SEQ ID NO: 31832 - DNA, 1395 bp, synthetic construct
  source 1..1395: mol_type = other DNA; note = Synthetic coding sequence
atggagccgtccagcttggagctcccggctgataccgtccagcgtatcgctgcagagctgaagtgccaccccacagatgaaagggtggcactgcaccttgatgaagaagacaagctcagacacttccgtgaatgtttctacatcccaaaaattcaggacctgccaccagtggatctgtctcttgtcaacaaagatgaaaatgcgatctatttcctgggcaacagtctggggttgcagcctaagatggtcaaaacctatcttgaggaagaacttgacaagtgggctaaaatcgccgcatatgggcatgaggtcggcaaacgcccgtggattaccggggatgagagcatcgtggggctgatgaaagatatagtcggtgctaatgaaaaggaaatagcacttatgaacgccttgacagttaatctccatctccttatgctcagcttttttaagcccacccccaaaaggtataaaatcttgctggaggcaaaagccttcccatcagatcactatgcaatagaatcccagttacagctgcatggcctgaatatcgaggaatccatgagaatgatcaagccacgcgagggagaggagaccctgaggattgaggacattctcgaggtgatagagaaggagggcgattctatcgccgtaatcctgttctcaggggttcacttctacaccggacaacactttaatattcccgcgatcacgaaagcgggacaggccaaaggatgctacgtcggcttcgatctggcgcacgccgtcggcaatgtggagctttatttgcacgattggggagtggatttcgcatgctggtgctcatataagtacctgaacgccggcgcgggcggcatcgcaggagccttcattcacgaaaagcacgcccacaccataaaacccgctttggtgggctggttcggacacgaattgagcaccaggtttaagatggacaataagcttcagcttatccccggggtctgtgggtttagaatcagtaatccacccatcctcctcgtgtgctcactccatgccagtctggagattttcaagcaggccacgatgaaggcactgcgcaagaagtccgtcctgttgaccggttatctggaatacctaataaagcacaactacggcaaagataaagctgccaccaagaagcccgtggtgaatatcattactccatctcacgtcgaagaacgcggctgtcagctcacgataacattttctgtccctaataaggatgtgttccaggaattggaaaagcgaggcgtcgtttgtgacaaacggaaccccaatgggatacgggtggctcccgttccattgtacaacagcttccacgacgtgtataagtttacgaatctgctcacttcaatcctggacagcgctgaaaccaagaac

SEQ ID NO: 31833 - DNA, 1395 bp, synthetic construct
  source 1..1395: mol_type = other DNA; note = Synthetic coding sequence
atggaacctagtagcctggagctcccagccgacaccgttcagcgtatagctgccgaattgaaatgtcatcctacagatgagcgtgttgctctgcaccttgacgaagaggataagctgaggcattttcgggaatgtttctatattcctaagatccaggacctcccaccagtggacctctcactggtgaacaaagatgagaacgcgatctacttcttggggaactcgcttggcctccagcccaagatggtgaagacataccttgaggaggaacttgacaaatgggctaagatagccgcttacgggcacgaagtcgggaaacggccatggattactggtgacgaaagtatcgtggggctcatgaaagacattgtcggcgctaatgaaaaggagatcgcgttgatgaatgccctcacggtgaacctgcatctgttaatgctgagtttttttaaaccaacccctaagagatacaagatactgcttgaggccaaagctttcccctcagatcactatgcaatcgaatcgcaactgcaactccacggcctgaatatcgaggagagcatgcgcatgattaagcctcgggagggcgaagagaccctgagaattgaagacattctcgaggtgatcgagaaagagggtgactccatagccgtgatattattcagtggcgtacacttctacaccggacagcacttcaacatcccggctattaccaaagcaggacaggcaaagggctgctatgtggggtttgacctagcgcatgcagtgggcaatgtggagctctacttgcacgactggggcgtggacttcgcctgttggtgctcgtataagtatctcaacgccggggccgggggtattgcgggggcttttatacatgagaagcacgcccacaccatcaagcctgccctggtgggttggtttggccatgagttatctacccgatttaagatggataacaaactgcagctgattccgggtgtctgcggcttcaggatttcaaacccaccaatactattggtgtgttctttacacgctagcctggagatttttaagcaagcaactatgaaagcccttagaaaaaagtctgtcttgctgacgggatacttggagtatctaatcaaacacaattacggaaaagacaaggcggcaaccaagaaaccggtagtcaatatcatcactccatcccacgtagaagaaaggggttgtcagctaacgatcaccttttctgttccaaataaagatgttttccaggagctagagaaaaggggggttgtctgtgataaaaggaatcctaacggcatccgcgtcgccccagtgcccttatataacagtttccacgatgtttataagttcactaatctactgacttcaatcttggattctgccgaaacgaaaaat

SEQ ID NO: 31834 - DNA, 1395 bp, synthetic construct
  source 1..1395: mol_type = other DNA; note = Synthetic coding sequence
atggagcccagttctttagaactaccagctgatactgtgcagagaatcgccgcagagttaaaatgtcatccaacggacgaacgggtggctctccacttggacgaggaagacaagctcaggcattttcgggaatgtttctatattcctaagatccaagatttgccaccggtcgacttatcgctcgttaacaaggatgaaaacgccatctacttcctcgggaacagtttaggcctgcagccaaagatggtgaagacttacttagaagaggaactggataaatgggctaagatagcagcctatggtcatgaagtagggaagagaccatggatcaccggggacgagtccatcgtgggcctcatgaaagacattgttggggccaacgagaaggaaatagctctcatgaatgcacttacggtaaacttgcatcttctgatgctctccttctttaagcccactcctaagagatacaagattctgctggaggccaaagccttcccaagcgaccattacgccattgagtcacagcttcagttgcatggactgaatattgaagagtccatgaggatgataaaacctcgagaaggcgaggagactctacggatcgaggatattctggaggtcatcgaaaaagagggagactcaatagccgtgattttgtttagcggggtacacttctacacgggccagcatttcaatatacccgccatcaccaaagccggtcaagccaaggggtgctacgtggggtttgatttggctcacgccgtggggaatgtggaactatacctacacgactggggagtggatttcgcttgttggtgtagttacaagtatctcaacgcaggagctggaggtattgcaggagcctttatccacgagaaacatgctcataccataaaacccgcgctcgtgggctggttcggtcacgagctgtccaccagatttaagatggacaataagctgcagctcatcccgggcgtgtgtgggtttaggatctctaatccacccattcttcttgtttgctccctgcacgcttcacttgagattttcaagcaggcgacaatgaaagcacttcgaaagaagtcagtattactgaccggctatctggaataccttattaagcataattatggaaaggataaggccgcgaccaagaaacccgtggtgaacatcattactccctcccacgtagaggaacggggttgtcagcttacaatcacatttagtgtcccaaataaagatgtattccaagagctcgaaaaacgaggggttgtatgcgacaaaaggaatcctaatggcatccgcgtggctcccgtacctttatataatagttttcacgatgtctacaaattcaccaacctcctgacctcgatcctggactccgcagagactaagaac

SEQ ID NO: 31835 - DNA, 1395 bp, synthetic construct
  source 1..1395: mol_type = other DNA; note = Synthetic coding sequence
atggagcccagctccctagagctgccagctgacaccgtccagcggatcgccgcagagctgaagtgccacccgactgacgaacgcgtggccttgcacctggacgaagaagataagctcagacatttccgggagtgcttctacattcccaagatccaggacctccccccagttgatctatccctggtgaacaaggatgaaaatgctatatacttcttaggaaattctctggggctgcagcccaaaatggtcaaaacttatctggaggaggaattggataaatgggcaaagatcgccgcctacggacatgaagtagggaagcgaccttggattaccggggatgaaagtatcgtgggtttgatgaaggacatcgtgggagccaacgaaaaagaaatcgccctaatgaacgctctgactgtaaacctacatctgctgatgctttcattttttaagccaacaccaaagcgctacaagatcctgctggaagctaaagccttcccatcagatcattacgccatagagagtcagctgcaactccatggcctcaatattgaagagtcaatgaggatgatcaagccacgagagggggaagagactttgaggatcgaggatattctagaggtgattgaaaaagaaggcgacagtatcgcagtaatactgttttcgggcgtccatttctacacgggccaacatttcaacattcctgccatcacaaaggcgggacaagcaaaggggtgctacgtcggcttcgatctcgcgcatgccgtggggaacgtggaactgtatctccacgactggggggtggacttcgcctgctggtgttcttataagtacttgaatgctggggccgggggaatagctggggcattcattcacgaaaagcacgcacataccatcaagccagcgctggtcgggtggttcggtcatgagcttagcacaagattcaagatggacaacaaactacagctgattccgggagtgtgtgggttccggatctctaatccacctatactgctggtttgttcactgcacgcgagccttgagattttcaaacaggccactatgaaagccctgcgcaaaaaatccgtgctactcacgggctatctcgagtatttgattaagcataactacggaaaagataaggcggccacgaagaaaccagtggttaacattattacgccttcgcacgttgaggagcgaggatgccagttgacaataacattttctgttcctaacaaagacgtgtttcaggaactggaaaaacgcggggtcgtgtgtgacaagcggaatcccaacggtatccgtgttgcaccagtcccactctacaactcctttcacgatgtgtacaagttcaccaatctcctcacatcgatcttagatagcgccgagaccaagaat

SEQ ID NO: 31836 - DNA, 1395 bp, synthetic construct
  source 1..1395: mol_type = other DNA; note = Synthetic coding sequence
atggaacccagcagccttgagctcccagctgatacagttcagcgtattgccgcggagttgaagtgccacccgacggatgaacgggtcgcccttcacctggatgaagaggacaaattaaggcattttcgagagtgcttttacatacccaagatccaggaccttccacccgtcgatctaagcctggttaacaaggatgaaaatgcaatctattttttaggtaattctcttgggcttcagcctaaaatggtaaaaacatatctagaggaagagctggacaaatgggctaaaatagcagcatacggccacgaagtcggcaaaaggccttggattacgggtgacgaatctattgttggcctcatgaaagacatcgtgggggccaacgaaaaggaaatcgctctaatgaacgcgctgacagtgaatctgcatcttttgatgttgtctttcttcaagcctactccaaaacggtataaaatcctgttagaagcaaaggcttttccgtcagatcattacgcgattgagagccagctgcaactgcacggccttaacattgaagagtcgatgaggatgataaaaccacgcgagggcgaagagacccttaggattgaggacatcctggaagtcatcgaaaaagaaggggatagtattgctgtcatcctgttctcaggggtacacttctacacaggccagcactttaatatcccggcaataaccaaagctgggcaggccaaaggctgttatgtaggttttgacctggctcacgccgtagggaacgtggaactctacctgcacgactggggggtcgattttgcttgttggtgtagctacaaatacctcaatgccggcgccggcggcattgctggggccttcatccatgagaagcatgcacataccataaaacctgcgcttgtaggctggttcgggcatgaattgtcaacacgcttcaagatggacaataagctccagttgatccctggcgtctgcggtttcagaatctctaatccgcccatcctgcttgtatgcagtctgcacgcctctctggaaatctttaagcaggctactatgaaagcacttaggaaaaaatcagttctcctaacaggatacctggaatatctcattaaacacaactacggaaaggataaggctgctactaagaaacctgtggtcaatattatcacgccatctcacgtggaagagcgggggtgtcagctgacaattactttcagcgtgcccaataaagatgtgtttcaggagctggagaagcgaggggtggtttgtgacaagaggaaccccaatggaatacgagtcgctccagtgccactctataactctttccacgatgtatacaaatttaccaatctgctgacaagtattttagattcggccgagacaaaaaat

SEQ ID NO: 31837 - DNA, 1395 bp, synthetic construct
  source 1..1395: mol_type = other DNA; note = Synthetic coding sequence
atggaaccatcatctctcgaacttcctgccgatacggtgcagcggatcgcagccgaactcaaatgtcatcccacagacgaacgggttgccctacatctagatgaagaggataagctccggcactttagggaatgcttttatatccccaaaattcaggatctacctcccgtggatctttctctggtgaataaggatgaaaatgcaatctactttctaggaaactccttaggacttcagccaaagatggtgaaaacgtacctcgaagaagaactagataaatgggctaagatcgccgcatatgggcatgaggtggggaaaaggccatggattactggagatgaatctatcgtcggactcatgaaagatatagtcggggccaatgaaaaggaaatagctcttatgaatgccctgactgttaatctgcatctgctgatgcttagtttctttaagcctactccaaaacggtataaaatactcctcgaagccaaagccttcccatcagatcattatgccatcgaatctcagttacagcttcacgggctcaatatcgaagaatccatgaggatgatcaaacctagggaaggagaagagacacttagaatagaagatatcctagaggttatagaaaaagaaggggattctatagccgtgattctcttttccggagtgcatttctatacagggcagcatttcaatatacccgccattactaaagccggacaggctaaagggtgttatgtaggatttgacttagcccacgccgtgggaaacgttgaactctatttacatgattggggagtggattttgcttgttggtgttcctacaaatatctaaacgcgggggctggaggaatcgcaggggcatttatccacgaaaaacatgcccacacaataaaacctgctttagttgggtggtttgggcatgaactttctacacgctttaaaatggataataaacttcagctgatccctggagtgtgcgggttccgaatctcaaatcctcctatcttactggtttgttcactccacgcttcacttgaaatattcaagcaggccactatgaaggcactccgaaaaaaatccgtacttcttacaggatacctggaatacctgataaaacataattatgggaaagataaagcagccactaaaaaacctgtcgtgaatatcatcacacccagtcatgtcgaggaaagaggatgccagcttactataacatttagtgtacccaataaggatgtttttcaggaactagaaaaacggggggtggtgtgtgataaacggaatccaaatgggataagggtggctcctgtgcctctctataattctttccatgatgtatacaagttcactaacctactgacatctattttagattcagccgaaacaaagaat

SEQ ID NO: 31838 - DNA, 1395 bp, synthetic construct
  source 1..1395: mol_type = other DNA; note = Synthetic coding sequence
atggagccgtcgagcttggagctcccggccgacactgtgcagcggatagccgctgaactgaagtgccatcccaccgacgaacgggtggccttgcatcttgatgaagaggacaaactgaggcacttccgtgagtgcttctacatcccgaagattcaggatctcccgccagtggacttgagccttgtgaacaaggacgaaaatgccatttacttcctgggaaactcactggggctgcagccgaagatggtcaagacctacctggaggaggaactcgacaagtgggcaaagatcgctgcttacggccatgaggtgggaaagcgcccctggatcactggtgatgagtcgatcgtgggactgatgaaagatatcgtgggtgccaatgaaaaagagatcgctctgatgaacgcgctgactgtgaacctgcatttgctgatgttgtctttcttcaagccaactccgaaaaggtacaagatcctgctggaggcaaaggcgtttccgtccgaccactacgccattgaatcacaactccagctgcatggactgaacatcgaagaatcaatgagaatgatcaagcctagagagggagaggaaaccctgcgaatcgaggacatcctggaagtgatcgagaaagaaggagactcaatcgccgtgattctgttctctggggtgcacttttacaccggacagcacttcaatatcccagcaatcaccaaagccggacaggcgaaagggtgctatgtgggattcgacctggcccacgccgttggaaatgtggaactgtacctccacgactggggagtggactttgcgtgttggtgcagctacaagtaccttaacgcgggcgccggcggtatcgcaggtgcatttatccatgaaaagcatgcgcacactatcaagcccgcactggtcggctggttcggtcatgaactctccactaggtttaagatggataacaaactccagcttattccaggagtgtgtggatttcggatctccaacccgccaatcttgctcgtgtgctccctgcacgcctccctcgaaatctttaaacaagccactatgaaagccctccggaagaagtccgtgctgctgactggctacctggagtacctgatcaaacacaattacggaaaggacaaggcggccaccaagaaacctgttgtgaacatcatcactccgagtcacgtggaggaaagaggctgccaactgaccatcactttctcagtgccgaacaaagacgtgtttcaggagttggagaagcgaggcgtggtgtgtgataagcgcaatccgaatgggatccgcgtggcgccagtcccactgtacaatagctttcacgacgtgtacaagtttacgaacctgctgacctcgatcctggattcggctgagactaagaac

SEQ ID NO: 31839 - DNA, 1395 bp, synthetic construct
  source 1..1395: mol_type = other DNA; note = Synthetic coding sequence
atggagcctagcagcctggaattacccgccgataccgttcaaagaatcgcagccgagctcaagtgccaccccactgatgagagagtggccctgcacctagacgaagaggataaactgcggcactttagggagtgtttctatattcccaaaattcaggacctgccaccagtggatctgtcactggtgaacaaggatgaaaatgcaatctattttttggggaattccttagggttgcaaccgaagatggtcaagacatatctcgaggaggaacttgacaaatgggccaagatagcagcatatggccatgaggtgggaaaaagaccttggatcactggcgatgagtcaatcgtaggcctcatgaaggacatcgtgggcgccaatgaaaaggaaatcgcactcatgaacgctctgaccgtgaacttgcatctcctcatgctaagcttctttaagcctaccccaaaaagatataaaatacttctcgaagctaaggcttttccttccgatcactacgcgattgagagccagctgcagctacatgggctgaatatagaagaatccatgcgcatgatcaaaccacgagagggggaagaaacgctcaggatagaagacatcctggaggtgatagaaaaggaaggtgattcgatcgctgtgattttgttcagtggagttcatttttatactggtcagcatttcaatattccagccatcacaaaagccgggcaggccaaagggtgttatgtgggtttcgatctggcccatgcagttggtaacgtggagctgtatcttcacgattggggagtggacttcgcctgctggtgctcttataagtatctcaacgcgggcgctggcgggatcgctggtgcgttcatccacgagaaacatgctcacaccatcaagccggcattggtgggatggtttggccacgaactctctacacgcttcaaaatggacaataaactgcaacttattcccggggtgtgcggtttccgcatttcaaatccacctattctcctcgtgtgcagcttgcacgcctcccttgagattttcaagcaggcgaccatgaaggccttacgcaagaaaagcgtgctcttgaccggttacctggaatacttgataaagcataactatggtaaagacaaggctgccaccaaaaagcctgtggtcaacataatcacgccttctcacgtggaggagcgcggttgtcagctgaccatcacttttagcgtaccaaataaggacgtctttcaggagttggagaagcgtggcgtagtatgtgataaacgaaaccctaacgggatccgagtggcccccgtacccttgtacaattcattccacgatgtgtacaagttcacgaatctgctcactagcattctggattccgcggaaacaaagaat

SEQ ID NO: 31840 - DNA, 1395 bp, synthetic construct
  source 1..1395: mol_type = other DNA; note = Synthetic coding sequence
atggagcctagtagcctggagcttccagctgacaccgtgcaacgcattgctgctgaattgaagtgtcatcctacggatgaaagagtggctctgcatctcgatgaggaagacaagctccgccattttcgggaatgcttttacatccccaagatccaagaccttccacctgtggacctgtcacttgtaaacaaggatgaaaacgctatttattttctcggaaacagcttggggcttcaacccaaaatggtgaagacatacctggaggaggagctggataaatgggcgaaaattgctgcatacgggcatgaagttggtaaaaggccttggatcactggagatgagtccatagtgggactcatgaaggacattgttggagcaaatgagaaggagattgcactgatgaacgcgctcactgttaacctgcatttgctgatgctctcattctttaaacctacccctaagcggtacaaaattcttctcgaggcaaaagctttccctagcgaccattatgctatcgagtcacagctccagctccacggcttgaacattgaggagagcatgagaatgatcaagccaagagaaggagaagaaacactgcgtattgaagacattctagaggtcatcgaaaaggaaggagactctatcgccgtcatcttattcagcggcgtccatttctacactggtcaacactttaacatcccagctattacaaaggctggccaggcaaagggctgctacgtcggctttgacttggcccacgcagtcggaaacgtggaactttacctccacgattggggagtggatttcgcttgttggtgctcgtacaagtacttaaatgcgggcgccggcgggatcgcaggggcatttatccatgagaaacacgctcacaccattaaaccagctctggtgggttggtttggacacgaactgtccactagatttaaaatggataataagctgcagctgattcctggcgtttgcggatttaggattagtaacccacctattcttttggtgtgcagccttcatgcctcacttgagatcttcaaacaagcaacaatgaaagctctgagaaagaaatctgtactgttaacaggttatttagaatatctcatcaagcataactacggtaaggacaaagctgctactaaaaaaccggtggttaacatcatcacccccagccacgtcgaagaaaggggctgccagctgactattacattttcggtgcctaacaaagatgtgttccaagagctggagaagaggggagtcgtctgtgataagcggaatccgaacggcatcagagtggcccctgtacctttgtataactctttccatgatgtgtacaagtttacaaatctcttgaccagtatcctggattccgcagagaccaagaac

SEQ ID NO: 31841 - DNA, 1395 bp, synthetic construct
  source 1..1395: mol_type = other DNA; note = Synthetic coding sequence
atggaaccgtccagcctggagcttccggccgacactgtgcaacgcatcgcagcggaactcaagtgccacccaactgacgaacgcgttgcactccacctggatgaagaagataagctgcggcatttcagggagtgcttctatatcccaaagatccaggacctcccaccggtggatcttagccttgtgaataaggatgaaaacgccatctactttcttggaaattcactgggactccagccgaaaatggtgaaaacttatctcgaagaggaattggataagtgggctaaaatcgccgcttacgggcacgaggtgggcaagcgcccctggattacgggagacgagtctatcgtcgggctcatgaaggacatcgtcggtgccaacgaaaaggagatcgctctcatgaacgccctcactgtgaacctccacctgctgatgctgtcatttttcaagccgaccccgaagcgctacaaaatcctgttggaagctaaggcctttccgtccgaccactacgccatcgaatcgcagctgcaactccacggcctcaacatcgaggagtcgatgaggatgatcaagccgagagagggcgaggaaactcttcgcatcgaggacatactggaggttatcgagaaagagggggactcaatcgcggtgatcctgttctctggagtgcacttctacacgggccagcacttcaatatcccagcgattaccaaggccggccaagcgaaaggttgctacgtgggatttgaccttgcccacgccgtgggcaatgtggaactttacctccatgactggggagtggatttcgcgtgctggtgttcgtacaaatacctgaatgctggagctggaggaatcgcaggggcgttcatccacgaaaagcatgcccacaccatcaagccggccctcgtcgggtggtttggacacgagctttcgaccagattcaaaatggacaacaaactgcagctcattcctggagtctgcggatttaggatttcgaatccgccgatcctgctggtctgctcccttcacgcatcacttgagatcttcaagcaggcgactatgaaggcgctccgcaagaaatccgtgctgctgaccggctacctggaatacttgatcaagcataactacggaaaagacaaggccgccactaaaaagcctgtggtcaacatcatcaccccatcgcatgtcgaggaacggggatgccagctgactatcacgttttccgtgccgaataaggacgtctttcaagagctggaaaagcggggtgtggtgtgcgacaagcggaatccgaacggcattcgagtggcccccgttcctctgtacaactcatttcacgatgtgtacaagttcaccaacctgctcacctcgatcctggattcagcagagacgaagaac

SEQ ID NO: 31842 - DNA, 1395 bp, synthetic construct
  source 1..1395: mol_type = other DNA; note = Synthetic coding sequence
atggagccttcttctctcgaactgccagccgacacagtacagagaattgcagctgagttaaaatgccacccaacagatgaacgggtcgccctgcatctcgacgaagaagataaacttcggcacttccgcgaatgcttttatatcccaaaaatccaggatctgccccctgtggacctgtctctagtcaacaaagatgaaaatgctatatactttctagggaattctctgggactccagcccaaaatggtcaaaacttacctggaagaagagctcgataaatgggccaagatcgccgcatatggacacgaagtcggaaaaagaccttggatcactggagatgaaagtatcgtcggactcatgaaagacatagttggagccaacgaaaaagaaattgctctaatgaatgcgttaactgtgaacctacatcttctcatgctttcattctttaaaccaacacctaaacgttataaaatactgcttgaagccaaagctttcccttcagaccactacgcaatagaatctcagttacagcttcatggactgaacatagaggaatccatgcggatgataaaacccagggaaggagaagaaactctgagaatagaagacatattagaagtcatagaaaaggagggggattctatagccgtaatactcttttcaggggtgcatttctatactgggcagcacttcaacattccagcaattacaaaagctgggcaggccaaaggatgctatgtgggatttgacctcgcacatgctgtgggaaatgtagaattatacctacacgattggggagtggacttcgcctgttggtgctcctataaatatctgaacgccggggccggaggaatagccggggctttcattcatgaaaaacatgctcacactatcaaacccgctctggtgggatggttcgggcatgaactcagtacacggtttaaaatggataataagttacaactgattcctggagtgtgtggattccggatctcaaacccccctatactgcttgtgtgttcactccatgcgtctttagaaattttcaaacaggctacaatgaaagcattaagaaagaaatcagtgcttctaactggatatctggaatatctcatcaaacataactacggaaaagataaagccgcaacaaaaaaaccagtagtaaatataattacaccttctcatgtcgaggaaagggggtgccagctcactattacattcagtgtccctaataaagatgtgtttcaggaactcgaaaaacggggagttgtgtgcgataaaaggaatccaaatggaatccgagtggcccctgtaccgttatataattcttttcatgatgtgtataaattcacaaatctcctaacaagtatccttgattccgctgaaactaaaaac

SEQ ID NO: 31843 - DNA, 1395 bp, synthetic construct
  source 1..1395: mol_type = other DNA; note = Synthetic coding sequence
atggagccgagttccctggagctgccggcagacaccgtccagagaattgccgcggagctgaagtgccatcctacggatgaacgagtggcactgcatttggacgaagaggataagctcagacatttccgtgagtgtttctatatacccaagatccaggacctgccccctgttgacttgagtttggtcaataaggatgagaatgccatctattttttgggtaattcgctgggactgcagcccaagatggtgaagacgtatttagaggaggagctagataagtgggcgaagattgctgcctacggccatgaggtcggaaaaagaccttggatcacgggcgatgaatctatcgttggattgatgaaagatatagtaggagcaaatgaaaaagagatagccttaatgaacgctctgactgtcaatctgcaccttctgatgttgtcgttttttaagccaactcccaaacgctataaaatcctgcttgaggccaaggcctttccatctgatcactatgcaattgagtcgcagttacagctgcatgggctcaacatagaagagtcgatgaggatgattaaaccccgtgagggtgaggagaccctcaggatcgaggacatcctggaagttattgagaaagaaggcgatagcatcgctgtcatcctgttttcaggcgtgcatttttatacaggccagcactttaacattcctgctattactaaagccggacaggcgaaagggtgttatgtgggtttcgatctcgcacatgctgtggggaacgttgagctatacctccacgactggggagtggactttgcctgctggtgctcatacaagtaccttaatgcaggcgcaggcggaatagccggcgcctttattcacgagaagcacgcacacactattaaaccggcccttgtcggatggttcgggcatgaactatctacaaggttcaagatggataataaactgcagctgatacctggcgtctgcggcttccggatctccaacccacctatcctgctggtatgctcgttgcatgcatccctcgaaatcttcaaacaggctactatgaaagctctccggaaaaaatctgtgcttttaacgggatatctcgagtatctgatcaaacacaactacggaaaggacaaggctgcgacaaaaaagcccgtggtgaacattatcaccccttcccacgtcgaagagcgaggctgtcagcttaccatcacattctccgtgcctaataaagatgtgttccaggagttagaaaagcgcggcgtcgtttgcgacaagcgaaacccaaacgggataagggttgcgcccgtacccctttacaattcctttcatgatgtgtacaaattcaccaaccttttgacttcaatcttagatagcgctgagacaaagaac

SEQ ID NO: 31844 - DNA, 1395 bp, synthetic construct
  source 1..1395: mol_type = other DNA; note = Synthetic coding sequence
atggaaccctcgtcccttgagctcccagcggataccgtgcaacgcattgcagcagagctgaagtgccatccgaccgatgagcgtgtggcgcttcaccttgatgaggaagataagctccgccactttagggagtgtttttacattccaaagatacaggaccttcctccggtggatctctcgcttgtgaacaaagatgagaatgcaatctactttctgggtaactcgctggggctgcaaccgaagatggttaaaacctacctggaggaagaactggacaagtgggccaagatcgcagcttatggtcatgaagtcggcaagcggccatggattaccggagatgaatcaattgtcggcctcatgaaggatatcgtcggagctaatgaaaaggagattgcacttatgaacgcccttactgtgaacctgcatctgttgatgcttagcttctttaagcctactcctaaacgttacaagatcctgctggaagctaaggcatttccttccgatcattacgcgatcgaatcccaacttcaactgcacggtctgaatatcgaagaatccatgagaatgatcaagccccgggaaggcgaggagacgctgagaattgaggacatactggaagtcattgaaaaggaaggcgattctattgcagtgatcctgttctccggagtgcacttctatactggacagcactttaacattccagcaatcactaaggcgggccaggcaaagggttgttacgtcggattcgacctcgcacatgcagtgggaaacgtggaattgtatctccatgactggggagtcgattttgcctgttggtgctcgtataagtaccttaacgcgggagccggggggatagcaggtgcattcattcatgaaaagcatgcccacactattaagccggcactggtgggatggtttggacacgagctgtcaactagatttaagatggacaacaaattgcaactcatccccggagtctgcggatttcgcatttccaatcctcctatcctgcttgtgtgctcactgcacgcgtcacttgaaatctttaagcaggcaaccatgaaagcccttcggaagaagtccgtgctgttgactggctacctggaatacctgattaagcacaattacggtaaggacaaggctgcaactaagaagccagtcgtgaatatcataactccttctcacgtggaagaacgcggttgtcaacttactattaccttttcggtgcctaataaggacgtgtttcaagaacttgaaaagcgtggtgtcgtgtgtgataaaagaaaccctaatggcattcgtgtggcccctgtgcctttgtacaacagctttcacgatgtctacaagtttactaatcttttgacctcaattctcgattccgcagaaaccaagaac

SEQ ID NO: 31845 - DNA, 1395 bp, synthetic construct
  source 1..1395: mol_type = other DNA; note = Synthetic coding sequence
atggagccttcatctctcgagcttccggctgacaccgttcagaggatcgctgccgaactcaaatgtcaccctacagatgagcgggtcgcgcttcacctagatgaagaggacaagttgcggcacttccgagagtgtttttatattccgaaaatccaagacctccctcctgtagacttaagccttgtcaacaaggatgaaaacgccatttactttttagggaactctctggggctgcagccaaaaatggtgaaaacatatctcgaagaggaactggacaaatgggcgaagattgcggcgtacggacacgaagtggggaagagaccatggataacaggggatgagtccattgtaggcctgatgaaagatatcgtcggggcaaacgagaaggagatcgctctcatgaatgcactgacagttaacctacacttacttatgctgtccttttttaaaccaactcccaagcggtacaaaatactcctcgaggctaaggccttccccagcgaccactacgctattgagtctcagctccagctacacgggctgaatatagaggagtccatgcgaatgattaagccccgcgagggggaggaaaccctgagaatcgaggacattctggaggttatcgaaaaggagggtgatagtatcgcggtaattctattctcaggggtgcatttttatactggccaacactttaacattccggcaatcaccaaagctgggcaggctaaaggatgctatgttgggtttgatctcgctcacgccgtgggcaacgtggagctgtacctgcacgactggggcgtagacttcgcttgttggtgtagctacaaatatttaaacgcaggcgctggcggaatcgcgggcgccttcattcatgagaagcatgcccacactatcaaacccgcactggtcggatggttcggacatgagctgagcactcgatttaagatggacaacaaactccagctgattcccggagtgtgtggttttcggatctccaatcctccaatcctgctggtttgctctctgcatgccagcctcgagattttcaaacaggctactatgaaggcactgaggaagaaaagtgtgctcctgactggatacctggagtatctgataaaacataattatggaaaagataaggcagctacaaagaaacccgtcgtcaatatcattactccgtcgcatgttgaggagagagggtgtcagctgacgattacgttttctgtgccaaataaggacgtctttcaggaacttgaaaagcgtggcgtcgtgtgcgataagcggaatccaaacgggatcagagtggcgccagtccctctgtacaatagcttccacgacgtgtacaaatttacaaatttacttacaagcatcttggattcagcagaaaccaagaac

SEQ ID NO: 31846 - DNA, 1395 bp, synthetic construct
  source 1..1395: mol_type = other DNA; note = Synthetic coding sequence
atggagccaagctcgctggaactgcccgccgacaccgtccaaagaatcgcagctgaattaaaatgccaccccaccgacgaacgcgttgccttgcacctggatgaggaggataagctgcgccactttagagaatgcttttatatacctaaaattcaggatctcccccccgtggatctgagcctcgtcaacaaggacgagaacgctatttacttccttggcaactctttggggctgcagccaaagatggtgaagacctaccttgaggaagagctcgataaatgggcgaaaattgctgcatatggccatgaggtgggtaaacgcccatggattaccggcgacgagtccatcgtggggctgatgaaggatatcgtcggagctaacgaaaaggaaattgcccttatgaatgcacttaccgtgaatttgcacctgctaatgttgtcttttttcaagccaacgccaaagaggtataagatattattggaggcaaaagcttttccgtctgatcattatgcgatagagagccagttgcagctgcacggcctgaacattgaggagagtatgcgcatgatcaagccaagagagggagaagagaccctgcgcatcgaggatatcctggaggtcatcgaaaaagagggggactcaatcgccgtgatcctcttttccggcgtacacttctacactggccagcattttaatattcctgctatcactaaagccggccaggctaaaggctgttacgtgggctttgaccttgcacacgctgtgggaaacgtagagctgtatcttcacgactggggcgtagactttgcgtgttggtgttcatacaaatacctgaacgcaggggccggtggcatcgcaggcgcctttatacacgaaaagcatgcccacacgatcaagcctgccctggtgggctggttcggccacgagctgagtaccagattcaagatggataacaaacttcagttgatacctggagtgtgcggctttaggattagcaacccaccgattttgttggtctgctccctgcacgccagtttagagatctttaaacaggcaaccatgaaagcactgagaaagaagtccgtcctacttacaggctatctggagtacctgattaaacacaactacggcaaggataaagctgccactaaaaagccagtggtgaacatcatcaccccctcgcacgtggaagagcgcggctgccagctgaccatcacattctctgtccccaataaggatgtcttccaggaacttgaaaagcgcggcgtcgtgtgtgacaagaggaatcctaatggtatccgagttgctcctgtgcctctctacaactctttccacgatgtctacaagttcacgaacctccttacttccatcctggactctgccgagacaaaaaat

SEQ ID NO: 31847 - DNA, 1395 bp, synthetic construct
  source 1..1395: mol_type = other DNA; note = Synthetic coding sequence
atggaaccttcatcccttgaactacctgctgacactgtccagaggatcgcggcagaattgaagtgtcatccaactgacgaaagggttgccttgcatttggatgaggaagacaaacttcgacacttcagggaatgcttctacatcccaaaaattcaggatcttcctcctgtggatttgagtcttgtaaataaggacgaaaatgccatttattttcttggaaattctctaggactgcagcctaaaatggttaaaacttatctcgaagaggagcttgataagtgggctaagatcgcagcatacggtcacgaagttgggaaaaggccttggatcacaggagatgaaagtatagtaggcttaatgaaggatatagttggggcaaatgagaaggagattgctttgatgaacgcccttacagttaacttgcaccttctaatgttgagcttcttcaagcctactccaaagcgttataaaatactccttgaagccaaagcattcccatctgatcattacgccattgaatctcaactccagctccatggacttaacattgaagagtctatgcggatgataaaaccacgggaaggcgaagaaaccctgagaatagaagatatcctcgaggtgatagaaaaggaaggggattcaatcgcagttatactttttagtggagttcacttctacaccggccaacacttcaacatcccggcgattaccaaggcgggccaagctaaaggatgctatgtaggtttcgatttggctcacgccgttgggaatgttgagttgtaccttcacgactggggtgtagacttcgcttgctggtgctcttacaagtatctaaatgccggtgccggtggcatagctggagccttcattcatgaaaaacatgctcacaccatcaagccagctctcgtcggctggttcgggcatgaattaagcacaaggtttaaaatggacaataagctgcagttgattcctggcgtttgtggctttaggatatcaaacccccctattttgctcgtttgttcattacacgcatctcttgagattttcaaacaagctacaatgaaggcattacgtaaaaaatctgtacttctcaccggttaccttgaatatcttattaagcataactacggaaaggacaaagcagccactaaaaaacctgtggttaatattattacacctagtcatgtcgaggagcgtggctgtcaattgacgataacgttctccgtgccaaataaagacgttttccaggagctcgagaagaggggtgttgtttgtgataagagaaatcctaatggaatcagggtagctccagtccccctttataacagctttcacgacgtgtacaaattcactaaccttctcacatccattttggattcagctgagactaagaat

SEQ ID NO: 31848 - DNA, 1395 bp, synthetic construct
  source 1..1395: mol_type = other DNA; note = Synthetic coding sequence
atggagccgtcttcgctggagctgccggcagatacggtgcagcgcatcgccgcggagctgaagtgccatccaactgatgagcgggtggctttgcacctggatgaggaagacaagctcagacatttcagagaatgcttctatattccaaagattcaggatctaccgccagtggacttgtctctggttaataaggatgagaacgctatctactttctcggcaactctctgggcctccaaccaaagatggttaagacctacttagaggaggaactcgataagtgggcaaagattgccgcatacggccacgaggtggggaagagaccctggatcaccggcgacgaaagcatagtgggactgatgaaggatatcgtgggagcaaacgaaaaagagatcgccttaatgaatgcccttaccgtgaaccttcacctgctgatgctgagttttttcaaacctacccccaagcgctacaagatcctgctggaagccaaagcatttccatccgatcactatgctatcgagtctcagctgcagcttcatgggttgaacatcgaggagagcatgcggatgatcaagccacgggagggagaagaaacactgcgcatcgaggatattttggaagttattgagaaggagggggactctatcgccgtgatattgttcagcggcgttcacttttacacgggccagcacttcaatatcccggccattactaaggctgggcaggccaaaggatgttatgtcgggttcgatctggcccacgcagtagggaacgtggagctgtatcttcacgactggggggttgattttgcgtgctggtgtagctacaagtatctcaatgcaggcgctggaggcattgccggggcgttcatccacgagaagcacgctcacactatcaagcccgctctagttggttggttcggccatgagctctcgacacgcttcaaaatggacaataaactgcaattgattcctggcgtgtgcggcttcaggatctctaaccctcctattctactggtatgcagcctccatgcctctttggagatattcaaacaggccaccatgaaagctcttcggaaaaagtcagtcctgctgaccggttacctcgaatacctgattaagcataattacggaaaagataaggctgctaccaagaagccagtggtgaacataattactcccagtcacgttgaagagagaggatgccagttaacgatcaccttttctgtgccgaataaggacgttttccaggagctggaaaaacggggagtggtttgcgacaagcgaaatccgaacggaatccgggttgcaccggtgccgctctataactccttccacgacgtgtataagtttacaaatcttttgacctcaatcttagacagtgcagagacaaagaac

SEQ ID NO: 31849 - DNA, 1395 bp, synthetic construct
  source 1..1395: mol_type = other DNA; note = Synthetic coding sequence
atggaaccatcgtcgcttgagctgcctgccgacaccgtccaacgcatcgccgccgaactcaagtgccacccgaccgacgagcgggtggccttgcacctggatgaagaggacaagctccgccatttccgggagtgtttctacattcctaaaatccaggaccttccgccggtggacctttccctcgtcaacaaggatgaaaatgccatctactttttgggaaacagcctgggactgcaaccgaagatggtcaaaacctacctggaagaagaactggataagtgggccaagatcgctgcttacgggcatgaagttggcaagcgcccttggataacgggtgatgaaagcatcgttggccttatgaaagacatcgtgggcgccaatgaaaaggagatcgccctgatgaacgctctgaccgtcaacttgcacctgttgatgctgagctttttcaagccaacgccgaagagatacaagattttgctggaagcaaaggccttcccgagcgaccattatgccatcgagtcgcaattgcagctccacggccttaacatcgaagagtccatgcgcatgatcaagccgcgcgagggcgaggaaaccctgcggattgaagatattctcgaagtcatcgagaaggagggagactccattgcagtgatccttttttccggagtgcacttctacaccggacagcatttcaacatccctgcgatcaccaaagcgggacaggccaaaggatgctacgtgggatttgacctcgcacatgctgtgggaaatgtcgagctgtacctgcatgattggggagtggatttcgcatgctggtgctcgtacaagtacctcaacgccggcgcaggaggaatcgcaggagctttcattcacgagaaacacgcacacaccatcaagcctgctctcgtcggctggttcggacacgagctctccactagattcaagatggataacaaactccaacttatccctggagtttgcgggtttaggatctcgaatccaccgatcctcctcgtttgctcactgcacgcttcattggaaatcttcaagcaggccactatgaaggcactgaggaagaaaagcgtgctgctgactggatacctcgaatacctgatcaagcacaactacggaaaagataaggctgctaccaagaagccggtggtcaatatcatcaccccgagccacgtcgaagaacggggctgccagctgactatcaccttctcggtgcctaacaaagacgtgtttcaagagctcgaaaaacgcggagtggtctgcgacaagagaaacccgaacggaatccgagtcgccccagtgccactgtataactcgttccatgatgtgtacaagtttaccaacctgctcaccagtatccttgactcggccgaaacgaagaac

SEQ ID NO: 31850 - DNA, 1395 bp, synthetic construct
  source 1..1395: mol_type = other DNA; note = Synthetic coding sequence
atggaaccttcctcgctcgagttgcccgcggacacagtccaaaggattgctgccgaactgaaatgtcaccccacagacgaacgggtcgccttacaccttgatgaagaagacaagctacggcactttcgagaatgcttttacatacccaaaatacaggacttgcctcctgtagacttgagcctggtcaataaagatgagaatgcaatttactttctaggtaactcattggggctacagccgaagatggttaaaacttatctcgaggaggagctggataagtgggctaagatcgctgcgtacgggcatgaagtgggaaaacggccgtggattactggcgatgagtctattgtgggactgatgaaggacattgttggcgctaatgaaaaggaaattgccttaatgaatgccttaaccgttaatctacatttactgatgctctccttcttcaagcctaccccaaagcgctacaaaatcctgttagaagccaaagctttcccttcggatcattacgccatcgagtcacagcttcagcttcacggcctcaatattgaggagtccatgcgtatgatcaaacccagggagggcgaagagacattacgcattgaggacatactggaagtgattgagaaggagggggactccatagcagtgatcctgttctctggcgttcacttttacaccggtcaacacttcaatatccctgctattacgaaagcaggacaggccaaaggctgctatgtcgggtttgatctggcgcatgcagtgggaaacgtcgagttatacttacatgattggggagtggactttgcctgttggtgctcctacaagtacctcaacgcgggtgcaggtggcatcgccggcgcatttatccatgaaaaacatgcccacaccataaaaccagccctcgtgggctggttcggccatgaattgtctacacgctttaaaatggataacaaacttcagttaatccctggggtctgtggatttcgcatctctaacccgcccattctcctcgtgtgttcgttgcacgcttccctggagatctttaagcaggccaccatgaaagcgctgcgcaaaaaatcagtgttgctaactggatacctagaatacttgattaaacataattacggaaaggacaaagccgccacaaaaaaaccggtggtgaatataatcacaccttctcacgtggaggaacggggctgtcagttgaccatcacgtttagtgtgcccaacaaggatgtgtttcaggaactcgagaaaagaggggtggtctgcgacaaacgcaacccaaatgggattcgggttgcccccgttccgctctacaactccttccacgacgtctacaagttcaccaaccttcttacttccatcctcgacagcgctgagacaaaaaat

SEQ ID NO: 31851 - DNA, 1395 bp, synthetic construct
  source 1..1395: mol_type = other DNA; note = Synthetic coding sequence
atggagccttcctcgctggaactgcctgcagatactgtgcaacggatcgcggccgagcttaaatgccaccctaccgacgaaagggtcgctctgcacctcgatgaagaggacaaactcaggcacttccgcgaatgcttttacatcccaaagatccaggacttgccgccagtcgacctgtcgctggtcaacaaggatgagaatgccatctacttcctcggtaatagcctgggactccaaccgaagatggttaaaacctatctggaagaagaacttgacaaatgggcaaagatcgccgcatacggacacgaagttggaaagcgaccgtggatcactggggacgagtccatcgtcgggctgatgaaggacatcgtgggagcaaacgaaaaagaaatagcactgatgaacgctctgacggtgaatctgcacttgcttatgctgtctttctttaagcccacgcctaagcgctacaagatcctcctggaggccaaggcattcccttctgatcactacgcgatcgaatcacagttgcagctgcatgggttgaacatcgaagaatcgatgcggatgatcaagccacgggaaggggaggagacgctgcggatcgaggatatccttgaggtgatcgagaaagaaggagacagcatcgccgtcattcttttctcaggggtgcatttctacactgggcagcatttcaatatccctgccattactaaagcgggacaggccaagggctgctacgtcggattcgatttggcgcacgccgtgggcaacgtggaactgtacctgcatgattggggagtggacttcgcgtgctggtgttcgtacaagtatttgaacgccggagcaggcggaatcgcgggagctttcattcatgagaagcacgcgcacaccattaagcccgcactggtggggtggtttgggcacgaactctcaaccagatttaagatggacaacaaactgcagctgatcccgggtgtgtgcgggttccgcatttccaacccacccattctgcttgtgtgttccctccacgcatccctggaaatcttcaagcaagccaccatgaaagccttgagaaagaaaagcgtcctgctgacgggctacttggagtacctgatcaagcacaactacggaaaggataaggccgctaccaagaagccggtggtgaacatcatcactccttcacacgttgaagaaagaggctgtcaattgactatcacgttcagcgtgccaaataaggacgtgtttcaggagctggagaagaggggtgtggtttgcgataaaaggaatcccaacggcattcgggtcgcaccggtgccactgtacaactcgttccatgacgtatacaagttcactaatctgctgaccagcatcttggattccgcagagactaagaat

SEQ ID NO: 31852 - DNA, 1395 bp, synthetic construct
  source 1..1395: mol_type = other DNA; note = Synthetic coding sequence
atggaaccgtctagccttgaacttccggctgatacggtccaacggatcgctgcggaactgaagtgtcaccccactgatgagcgcgtggccctgcacctcgacgaagaagataagctgaggcattttagagaatgtttttacatcccgaaaatccaggatctgccaccagtggacctgtctctggtcaataaggatgaaaatgcgatttactttctcggaaactccctggggttgcagcctaagatggtgaaaacctaccttgaggaggagctcgataagtgggcgaagattgccgcttacgggcacgaagtggggaagcggccatggatcacgggtgatgaaagcatcgtgggccttatgaaggacatcgtcggagcgaacgagaaggaaattgcactgatgaacgcacttactgttaatctccatttgttgatgctttcgtttttcaaaccaaccccaaagagatacaagattcttcttgaagcaaaggcatttccttccgatcattacgcaatcgagtcacaacttcaacttcacgggctcaacattgaggaaagcatgcgcatgataaagcctagagagggtgaagaaaccttgcgcatcgaggacattctggaggtcattgaaaaagaaggggattcgatagcagtgatcctcttctccggggttcacttttacactgggcagcacttcaatattcctgcaattacgaaggcgggtcaagccaagggttgttacgtcggatttgatttggcacatgccgtgggaaacgtcgaactttacttgcatgattggggtgtcgattttgcatgttggtgctcctacaaatatcttaatgcgggagcagggggaatcgccggagcattcattcatgaaaagcatgcacataccattaagcctgcacttgtgggatggttcggacatgaactgtctactagattcaagatggataacaagctccagttgattccaggcgtgtgcggctttcgtatttcaaatccccctatcctcctggtgtgctcgttgcatgcctcacttgaaatcttcaagcaggcaacgatgaaggcactgagaaagaagagcgtcttgcttactggttaccttgaatacctgatcaagcataactatggtaaggacaaagcagcaaccaagaagcctgtggtgaacattatcactccatcccacgtggaggagcgtggttgtcagcttactattaccttcagcgtgccaaacaaggacgtgtttcaagagctggagaaaaggggagtggtgtgtgataagcgcaatcctaacggtattcgggtcgcacccgtgcctctctacaactcgttccacgacgtgtacaagttcaccaacttgttgaccagcattctggacagcgcagagactaagaat

SEQ ID NO: 31853 - DNA, 1395 bp, synthetic construct
  source 1..1395: mol_type = other DNA; note = Synthetic coding sequence
atggaaccatcttcccttgagctgcctgcagatactgtacagagaattgcagctgagttgaagtgtcaccctacggatgaaagagtcgcactgcatctggatgaagaggataagttacggcacttccgggaatgtttctacattccgaagatccaagacctgccgccagtagacctgtcccttgtgaacaaagatgagaacgcgatatacttcttgggaaattcactaggactgcagcccaagatggtcaagacctacctagaggaggaactggacaaatgggccaagatcgccgcctatggtcatgaagttggaaagcgtccctggatcactggcgacgaaagcattgtggggctgatgaaagacatcgtgggggccaacgaaaaagagatagcactgatgaatgccttgactgttaatcttcatctattgatgctctcttttttcaaaccaacccctaagcgctataagatcttactcgaggctaaagcgtttccatccgatcactatgccattgaatcgcagttacagctacacggcctgaatatcgaagagagcatgagaatgatcaaaccccgagagggggaagaaactctgcggattgaggatatactagaggtgattgaaaaggagggtgactcaatcgccgtaattctcttctcaggggtacacttctataccggccaacacttcaacatacctgcgataacgaaagccgggcaagccaaggggtgctatgttggatttgacctggcgcacgcagtcggtaatgtagagctgtacttacacgattggggggtggatttcgcgtgctggtgcagctataagtacctgaatgcaggtgcaggaggaatagctggcgcattcattcatgaaaagcatgcccacaccattaagccagcccttgtgggctggtttggtcatgaactgagcacacgctttaagatggataacaaactccagttaatccccggagtgtgcgggttccgaatcagcaatccacctatccttttggtttgctctctgcacgcatccctcgagatctttaagcaggcaaccatgaaagccttgcgaaagaaaagtgtcttgctcaccggctatctcgaatacctgataaaacacaactacggcaaggataaagctgcgactaagaaacccgtggtcaacatcatcacaccatcccacgtggaggaacgaggctgtcaactgacaataactttttcggtacctaataaagacgtatttcaggaattggaaaaaagaggcgtggtctgtgataagagaaatcccaatggcatccgggtggccccggtccctctctataacagctttcatgacgtgtacaagttcaccaacctgttgacatccatcctggactccgcggagaccaagaac

SEQ ID NO: 31854 - DNA, 1395 bp, synthetic construct
  source 1..1395: mol_type = other DNA; note = Synthetic coding sequence
atggagccatcgtcgctcgaacttcccgccgacacggtgcagcggattgcagccgagttgaaatgccatccgacggacgagcgggttgctttgcatctggacgaggaggacaagttgcgtcattttagggaatgtttttatatacccaaaattcaagacttacctccggtcgacttgagcctggtcaataaagatgagaatgcgatctacttcctcgggaacagtctagggctgcagccaaagatggtgaagacttacctggaggaggagctcgataagtgggccaagattgctgcctacgggcatgaagtgggcaaacgaccctggattacaggcgacgagagtatcgtaggcttgatgaaggatatcgttggcgccaatgaaaaagaaatcgccctaatgaacgcactcactgttaacctccatctgcttatgttgtccttctttaaacctacacctaagaggtacaagattttgctcgaggccaaggcgtttccaagcgatcactacgctatcgagtcccagctccaacttcatggtttaaacatagaagaatctatgaggatgatcaagcctagagaaggggaggagacactcaggatcgaggacatcttagaagtcatagagaaggagggcgacagtatcgccgtgatccttttctctggtgtgcatttctacacaggacagcatttcaacattccggcaatcaccaaggccggtcaggccaaagggtgctacgtgggttttgatttagcccatgcagttgggaatgtggagttatacctgcacgattggggcgttgactttgcatgttggtgtagttacaagtatctgaacgccggtgctggcgggatagcaggagctttcatccatgaaaagcacgcacataccataaaacccgcgctggtgggctggtttggacacgaattgtcaacgcgcttcaagatggacaataagctgcagctaatcccaggtgtgtgtggcttcagaattagtaatccccctatcctactagtttgcagtctccatgcttctctggaaatctttaagcaagcaactatgaaggcgctccgcaagaagagcgtgttactgactggctaccttgagtatttaataaagcacaattatggtaaggacaaggcggcaaccaaaaagcctgttgtaaacattattacaccctcccacgtcgaggaacgcggatgtcagctcactattacgttctccgtgcctaataaggatgtttttcaggaacttgagaaaagaggggtcgtatgtgataagcgcaatcctaatggcattcgtgtggctcctgtccctctctataactcgttccatgatgtatacaaattcacgaaccttcttacaagtatactagactccgcagagaccaaaaat

SEQ ID NO: 31855 - DNA, 1395 bp, synthetic construct
  source 1..1395: mol_type = other DNA; note = Synthetic coding sequence
atggagccatcaagcctggagctccctgctgataccgtgcagagaatcgccgctgaacttaaatgccaccctacggacgagagagttgccctccacctggacgaagaggacaagctgcggcactttagggaatgcttttacatcccaaagatccaggacctgccgccggtggacctgtcacttgtgaataaggatgaaaatgctatctactttctgggaaactccctgggattgcagccaaagatggttaagacctacttggaagaagaacttgataagtgggccaagattgccgcgtacggacatgaggtgggaaagaggccttggatcaccggtgacgagtcaattgtgggcctgatgaaggatatcgtgggagctaacgagaaagaaattgccctcatgaatgctcttactgtcaacctccatcttctcatgctgtcgttctttaagccgaccccaaagcggtacaaaatcctcttggaagcgaaagccttcccgtcagaccactatgctatcgaatcccagctccaactgcacgggctgaacatcgaagaatcgatgcgcatgatcaagccgcgagagggcgaagagactctgcgcattgaggacattctcgaggtcatcgaaaaagaaggcgactcgatcgctgtgatcctgttctccggagtccatttctacacgggccagcacttcaacatccccgccattaccaaggccggccaagccaaggggtgctacgtcggattcgacctggcgcatgctgtgggaaacgtggaactttacctgcacgattggggagtggactttgcctgctggtgttcatacaagtatctgaacgcaggggccgggggcatcgcgggagcctttatccacgagaaacacgctcatactatcaaaccggcgttggtgggctggttcggacacgagctttcaacccgattcaaaatggacaataagctccaactcatccctggtgtctgcggattccgcatctcgaacccgccgatcctgctcgtctgctcgctgcacgcatcgttggagatctttaaacaggcgactatgaaggcactgagaaaaaagtccgtgctgctgacgggatacttggagtacttgattaagcacaactacgggaaagataaggcagccactaagaaacccgtggtgaacatcattactccttctcatgtggaggaaagaggatgccaattgaccatcaccttttcagtcccaaataaggacgtgttccaggaacttgaaaaaaggggcgttgtctgcgacaagcgcaacccgaatggaattcgcgtcgcgcccgtgcctctctacaactcattccatgatgtgtacaagttcactaacctgctcacttccatcctggactccgcagagactaagaac

SEQ ID NO: 31856 - DNA, 1395 bp, synthetic construct
  source 1..1395: mol_type = other DNA; note = Synthetic coding sequence
atggagccatcgagtctcgagttgccagccgatacggtgcaacgcattgccgccgaactgaagtgccaccctacggacgagcgggtggccctgcacctggacgaggaagataagctgcggcatttccgggagtgcttctacattcccaagatccaggacctccctccggtggatctttccctggtcaacaaggatgagaacgcaatatacttcttgggtaattcgttgggacttcagccgaagatggtgaaaacctacctggaagaagagctcgacaagtgggctaagatcgcggcctacgggcacgaagtcggaaaaagaccatggatcaccggagacgaatctatcgtgggcttgatgaaggatatcgtgggcgccaatgagaaagaaatcgccctgatgaacgcgttgaccgtgaacctgcaccttctgatgctttccttctttaagccaaccccaaagagatataagatcctgctggaggcgaaggcattcccatcagaccactacgcgatcgagtcccagctgcagttgcacggactgaacatcgaagagtccatgcgcatgatcaaaccacgggagggagaagagactctgagaattgaagatatcctggaggtgatcgagaaggagggtgacagcattgccgtgatccttttttcgggagtgcatttctacaccggacagcacttcaacatccctgcgattaccaaagcgggccaagcaaaggggtgttacgtgggatttgatcttgcgcatgctgtcggcaatgtcgagctgtatctgcatgattggggcgtagacttcgcctgctggtgttcatacaagtacctgaacgcgggagctggaggtatcgcgggcgcgttcatccatgagaaacacgcacatacgatcaagccggccctggtgggctggttcggacacgaactgtcgactcgctttaagatggataacaagctgcagctgatcccgggagtctgcggatttagaatatcaaatccccctatcctgctggtgtgcagcttgcacgctagcctggagattttcaagcaggctactatgaaggcgcttcggaagaaatcggtgttgctcaccggttacctggaatacttgatcaagcacaattacgggaaagacaaagccgccaccaaaaagccggtggtgaacatcattactccttcgcacgtcgaagagagagggtgccaactgactatcaccttctcggtcccgaacaaggacgtctttcaagagctggaaaaaagaggcgtcgtttgtgacaaacgcaatccaaacggaatccgcgtcgcaccagtgcccctgtacaacagcttccatgatgtttacaagttcaccaatttgttgacctcaatcctcgacagcgcagaaaccaaaaat

SEQ ID NO: 31857 - DNA, 1395 bp, synthetic construct
  source 1..1395: mol_type = other DNA; note = Synthetic coding sequence
atggaaccatcatcgcttgaacttcccgcggatacggtgcaacggattgctgcagaactgaaatgtcacccaacggacgagcgagtggcccttcatctggacgaagaggataaacttagacattttcgtgagtgcttctacatccccaagattcaggacctgcctcctgtggatctgagcctggtgaacaaggacgaaaatgctatatacttcctgggtaactcgctgggacttcagcctaaaatggtgaaaacctatcttgaggaagaactcgacaagtgggcgaagatcgctgcgtacggtcatgaagtcggcaagaggccatggatcactggagatgagtcgattgtcgggcttatgaaggacatcgtgggtgccaacgagaaagaaattgcacttatgaacgcacttactgtcaaccttcatcttctcatgctgtcgtttttcaagccaactcccaagagatacaagatactgctggaagcgaaggcgttcccatccgaccattacgcgattgaatcacagctccagctccacggactcaacatagaggaatcgatgagaatgattaagcctcgggaaggagaggaaacgctccgaattgaagatatcttggaggttattgaaaaggagggcgattccatcgccgtgatcttgttcagcggggtgcacttttacactgggcaacactttaacataccggcaatcaccaaggcaggacaagctaaaggttgttacgtcgggtttgacctggcacacgcagtaggtaatgtagagctttacctgcatgattggggtgtcgattttgcctgttggtgttcttacaagtacctgaacgcgggagccggagggattgcaggagcattcattcacgaaaaacatgcacatactatcaagcctgcgctcgtgggatggtttggccatgaactctcgaccagattcaagatggataacaagctccagctcatacctggagtgtgtggcttccgcatttccaacccgcccatactcttggtttgctcgctgcacgcatcgctcgaaatctttaaacaagccactatgaaggcactgaggaaaaagagtgtgctgcttaccggctaccttgaatacctgatcaaacataactatggaaaggataaggcagcgactaagaagccagttgtgaacatcatcactccttcacatgtggaggagcgtggatgtcaacttaccattactttttcagtgcctaataaggacgtgtttcaggaacttgagaaacgcggtgtggtctgcgataaacgtaatccaaatggaattcgcgtggctccggtgcctttgtacaacagtttccacgacgtgtataagtttaccaatctcctgacctccattctggattccgcagaaaccaagaat

SEQ ID NO: 31858 - DNA, 1395 bp, synthetic construct
  source 1..1395: mol_type = other DNA; note = Synthetic coding sequence
atggaaccctcgagcttggaattgccagctgacaccgtgcaaaggattgccgcggaactgaagtgccacccaaccgatgaacgagtggcacttcacctcgatgaggaagataagctcagacattttcgggaatgcttctatatcccaaagattcaagatctcccccctgtcgatctgtcactggtgaacaaggatgagaacgcaatctacttccttggaaatagtctgggactgcaacccaagatggtgaaaacctacttggaagaagaactggataagtgggcgaagatagccgcatacggtcatgaagtgggaaaaagaccttggatcaccggcgacgagtctattgtgggtcttatgaaagatattgtgggagcaaacgaaaaggaaatagcacttatgaacgcacttactgtgaaccttcaccttttgatgcttagcttctttaaaccaactcctaagcgctacaagatcctcctggaagcgaaggcatttccctcagatcattacgcaattgagtcacaactgcaacttcatggactgaacatcgaagaatccatgagaatgatcaaacctcgagaaggagaagaaactcttagaattgaggacatactcgaggtgattgagaaggagggtgactcgattgccgtgattcttttctcaggtgtgcacttttacaccggacagcactttaacattcccgcaattacgaaggcaggtcaagcaaagggttgctacgttggctttgaccttgcccatgccgtcgggaatgtcgaattgtaccttcatgattggggagtggactttgcatgctggtgcagctacaaatatctcaacgcaggcgcaggtggaattgcaggagcatttatccatgaaaagcacgcccatactattaagccggccctggtgggctggtttgggcatgaacttagcacccgctttaagatggataacaaactgcagctcatccctggcgtctgtggtttccgcatctccaatccgccaattctcctcgtgtgtagccttcacgcgagcctggagatcttcaaacaagcaaccatgaaggctttgagaaagaagtcggtgcttctgactggttacctcgaatacctgatcaagcacaactacggaaaggacaaagctgcaactaagaagccagttgtgaacatcattactccctcgcatgttgaagagcggggctgtcaactgacgattaccttttccgtgcctaacaaggatgtgttccaagaactcgaaaagagaggtgttgtgtgtgataagcgtaacccaaatggaatccgagtggcccctgtgcccctctacaattcgtttcatgatgtgtataagtttacgaacctcttgacctcgatcctggattcggctgaaaccaagaac

SEQ ID NO: 31859 - DNA, 1395 bp, synthetic construct
  source 1..1395: mol_type = other DNA; note = Synthetic coding sequence
atggaaccttcttctttggagttgcccgccgatacagtgcagcgcatcgctgctgaacttaagtgccatccaacagacgagagggtcgcgttgcacctcgacgaggaggataaactccggcactttcgcgaatgcttttacattccgaagattcaggacctgcctccagtcgatctgtctctagttaataaggatgagaatgctatatattttctgggaaattcacttggactgcagccgaaaatggtgaaaacatacctcgaggaagagttggataaatgggccaagatcgctgcatacggtcacgaagtggggaaaaggccttggattacaggtgacgaaagtatagtggggctgatgaaggacattgtcggtgctaatgagaaagaaattgccctcatgaatgctttgacagtcaacttgcatctattaatgctgagcttcttcaagcccacaccaaaaaggtataagatacttctggaggcaaaagcctttccatcggatcattacgcaatcgagtcccagctgcagctgcacggattgaacatagaagagagcatgcgcatgataaagcctcgcgagggcgaggagactctgcgtatcgaagatatcctggaggttatcgagaaggaaggggactccattgcggtcatcttattcagcggcgtgcatttctatacgggtcagcatttcaacattcccgcaataacgaaggccgggcaggcaaaaggctgctacgtgggttttgatctggcccacgcggtggggaacgtagagttgtacttgcacgactggggagtggattttgcttgttggtgttcctacaaatatcttaatgccggcgctggtggcattgcaggagcgttcattcacgagaaacacgcacacacaattaagcccgctctcgttgggtggttcggccatgagctgtctactaggtttaaaatggataataagcttcagctcatacctggggtttgcggcttcagaatctctaatccaccaatcctcctggtgtgcagcttgcacgctagtctagagattttcaagcaagctacaatgaaggcgctacggaaaaaatcagttcttctcaccggatacctcgagtatctgatcaaacacaactatggcaaagacaaagctgcaacaaagaagcccgtcgttaatatcatcacaccatctcatgtggaagagaggggatgtcagctcaccattactttcagcgtgccaaataaagacgtgtttcaggaactggagaagagaggggtggtgtgtgacaaacgcaaccctaatggaatcagagtggcccctgtgccgctgtataattcctttcacgacgtgtacaaatttaccaacttgctgactagtattctggatagcgccgagacgaagaat

SEQ ID NO: 31860 - DNA, 1395 bp, synthetic construct
  source 1..1395: mol_type = other DNA; note = Synthetic coding sequence
atggagccttcgagccttgagctccccgcagacaccgtgcagaggattgcagctgagctgaaatgtcaccctactgatgaaagagtggcactgcatcttgatgaagaggataagttgagacatttccgagagtgcttttacatcccaaagattcaggacctccctcctgtggacctgtcactggtgaacaaagacgaaaacgcgatctatttcctcggtaattcgcttggtttgcagccgaagatggttaagacctaccttgaagaggagctggacaagtgggcaaagattgcagcatacgggcacgaagtcggtaagcgcccgtggattactggcgacgaatccatcgtcggactgatgaaggacatcgtgggtgccaatgaaaaagaaattgccctgatgaatgcactgactgttaacctccatcttctgatgcttagctttttcaagcctaccccaaaacgatacaaaattctccttgaagcgaaggccttcccttcggatcactacgcaatcgaaagccaactgcagctgcacggtttgaatattgaagaatccatgcggatgatcaagcctagggagggagaagaaactctccgcattgaggatattcttgaggtgatcgagaaagaaggagattctatagcagtgatattgttttccggagtgcacttctacactggccagcactttaacatccccgcgatcacgaaggcaggacaggctaagggctgttacgtgggttttgacctggcacatgcggttggtaacgtcgaactctaccttcacgactggggagtcgactttgcgtgctggtgctcctacaaatatcttaatgcaggcgcaggaggtattgcgggggcattcatccatgagaagcatgcccatacgataaagccggcgctggtgggatggtttggacatgagctctcgactaggtttaagatggataacaagttgcagctgattcctggagtctgtgggtttcggatctccaacccgcctatactgctggtctgttcgctgcatgcatcccttgagatctttaaacaggcaaccatgaaggcattgagaaagaagagcgtcctcctgactgggtacctggagtacctgattaagcacaattatggaaaagataaagccgcaaccaaaaagcctgtcgtgaacatcatcacccctagccatgtggaagaacggggttgccagctcactattactttttcggtgccaaacaaggatgtgtttcaggaactggaaaaaaggggggtggtgtgcgacaagcgcaatccaaacgggataagagtcgcaccagtgccattgtacaattctttccatgatgtgtacaagtttaccaaccttctgacgagcatacttgatagcgccgaaactaagaac

SEQ ID NO: 31861 - DNA, 1395 bp, synthetic construct
  source 1..1395: mol_type = other DNA; note = Synthetic coding sequence
atggaacctagctcgctggaactccccgccgatactgtccagcggatcgccgcggaactgaagtgccatcctactgacgaaagggtcgctctgcacctggacgaagaagataagttgcggcatttccgggaatgcttctacatcccgaaaatccaagacctgccaccagtggacctgtccctcgtgaacaaggacgagaacgccatttactttctgggtaactcgctgggactgcagccaaagatggtgaaaacgtacctggaggaagaacttgataagtgggccaaaattgcagcttacggacacgaggtcggaaagcggccgtggatcacgggggacgaaagcatcgtgggactgatgaaagatatcgtgggagccaatgagaaagagatcgcgcttatgaacgcacttacggtcaaccttcatctcctgatgctgtcattcttcaaaccaacccccaagagatacaagatccttctggaagcgaaagcgttcccgtcggatcattacgcaatcgaatcccagttgcagctgcacggactgaatatagaagagtcgatgcgcatgatcaagccaagagaaggcgaagaaacccttcgcatagaggatatcctggaagtgatcgagaaggaaggggacagcattgccgttatcctgttcagcggagtgcatttctacactggtcagcactttaacatccccgccattaccaaggccggacaggccaaaggatgttacgtgggttttgacctggctcacgccgtgggtaacgtggaactgtaccttcacgactggggcgtcgacttcgcctgctggtgttcgtataagtacctcaacgcaggagcaggtggtatcgccggagcctttatccacgaaaagcacgcccacaccatcaaaccggcactggtggggtggtttggccatgaactgtctactcggttcaagatggataacaagctgcaactgatccccggagtgtgcggattccgaatctccaacccgccgatcctgctcgtctgctcactccatgcttcgctggaaatctttaagcaagccactatgaaggccctgcgcaagaagtcagtcctgttgaccggctacctggagtatctgatcaagcataactacgggaaggacaaggccgcaaccaagaaacccgtggtgaatatcatcacgccgtcacatgtggaggaaaggggatgccagctgactatcacttttagcgtgccgaataaagatgtgtttcaggagctggaaaagcgcggcgtcgtgtgtgacaagcgcaatccaaatggaatccgggtggcgcccgtgccgctgtacaattcgttccatgacgtctataagtttaccaacttgcttaccagcatcctcgactcagctgaaaccaaaaat

SEQ ID NO: 31862 - DNA, 1395 bp, synthetic construct
  source 1..1395: mol_type = other DNA; note = Synthetic coding sequence
atggaaccgtcgtcgctggaactgccagcagacactgtccagcgcatcgccgctgagttgaaatgccacccgactgacgaacgggtggctctgcacctggatgaggaagataagttgcggcattttcgcgagtgcttttacatccccaaaatccaggacctgccacctgtagatctcagcctcgtcaacaaggacgaaaatgcaatctacttcctgggcaactcccttggactccagccgaaaatggtcaagacttacctcgaagaagagctggataaatgggcaaagattgcagcttacggccacgaggtgggaaagcgcccttggattactggggacgagtcaatagtgggtttgatgaaggacatcgtcggagctaatgaaaaggaaattgcactcatgaacgcacttaccgtcaacctgcatctgctgatgctctcattcttcaagccaacccctaagagatataagatcctcttggaagccaaagcatttcctagcgatcattacgctatcgaaagccaactgcagcttcacggcctcaatatcgaggagtccatgcggatgatcaagcctagagaaggagaagaaactctccgaatcgaggacatcttggaggtgatcgagaaggagggagattcgattgcggtgatcctgttctccggcgtgcacttctataccggccagcacttcaatatcccggccataaccaaggcagggcaagcgaaaggttgctacgtcggattcgatttggcgcatgccgtgggaaacgtggaactctacctgcacgattggggagtcgactttgcctgctggtgcagctacaagtacctgaacgcgggagcgggcggaatcgccggagctttcatacacgagaagcatgcgcataccattaagccggcgttggtcggttggttcggacatgaactcagcacccgcttcaagatggataacaagttgcaactcatccctggagtatgcggcttccgcatttcaaatccccctatcctgcttgtctgctcactgcatgcttcgctggagatcttcaagcaagcgaccatgaaggccctcagaaagaagtcagtgctgctcacgggataccttgagtacctgattaagcacaactacgggaaggacaaggccgcaactaaaaagccagtagtgaacatcatcaccccgtcccacgtcgaggagagaggatgtcagctgacgatcaccttttccgtgccgaataaagacgtgttccaggaactggagaaaaggggggtggtgtgtgacaagaggaatcccaatggcatcagagtcgccccggtgccactgtacaattcgtttcacgacgtttacaaattcactaaccttctcacttctatcctggattccgcggaaaccaagaac

SEQ ID NO: 31863 - DNA, 1395 bp, synthetic construct
  source 1..1395: mol_type = other DNA; note = Synthetic coding sequence
atggagccgtccagcctcgagctgcctgccgatacggtgcagcgaatcgcagccgagctcaagtgtcaccctacggacgaaagggtggcactgcacctggacgaggaagataaactacgtcacttcagagagtgtttttacatcccaaagattcaggatttgcccccagtggacctcagcctggtcaacaaggatgagaacgccatctattttttggggaactcactgggcctccaacctaaaatggtgaaaacgtaccttgaagaggagctggataagtgggcaaagattgctgcctatgggcacgaagtcggcaagaggccctggatcaccggggacgagtccatagtgggcctgatgaaagacattgtgggggccaacgagaaagaaattgcgctgatgaatgctctcactgttaatttgcacctgctgatgctgtcgtttttcaagccgacccctaagaggtacaagattctgctcgaagcaaaggcctttccgtctgatcattacgccatcgagagtcagctacaacttcatggcctgaacatcgaagagagtatgcgcatgattaagcctagggagggggaggaaaccctgcggattgaagatatcttagaagtcattgaaaaagaaggagattcgattgcagtcatactattttctggcgtccacttctataccggccagcattttaacattcctgcaatcacaaaagccggccaggcaaaaggctgttatgtagggttcgatcttgcccatgccgtgggtaatgtggaattatatctgcacgattggggtgtggatttcgcatgttggtgttcctacaagtacttaaacgccggagccggaggaatcgctggtgccttcattcacgaaaaacacgcacacacgattaagcctgccctggtaggctggtttgggcacgaactgtctactaggtttaaaatggacaacaaactgcagctgattcccggagtctgtggttttcgcatctcaaaccctccgatcctacttgtgtgttcactgcacgcttcacttgagatctttaagcaggccacaatgaaggccctgcgaaagaagtctgtgctactaactggctacctagaatatctaattaagcacaattacgggaaggacaaggcagccacaaagaagcccgtggtcaacatcatcacccccagtcacgtcgaagaacgcgggtgtcagctgaccatcacattcagcgttcccaacaaagatgtgttccaggaactggagaaaaggggcgtggtgtgtgataagcggaatcccaatggcatccgcgttgcacccgtgccgctctataactccttccacgatgtttacaagtttacaaatctgctgacatctatactggattcggccgaaactaagaat

SEQ ID NO: 31864 - DNA, 1395 bp, synthetic construct
  source 1..1395: mol_type = other DNA; note = Synthetic coding sequence
atggagccgtcatcccttgaactgcctgctgatactgtgcagcgcatcgcagccgagctcaagtgtcacccgactgatgaacgcgtagctctccacctggatgaggaggacaagttgcgccacttccgcgagtgcttctacattcccaagattcaggacctccctccagtagatctgtcccttgtgaacaaggatgaaaacgctatctatttcctgggcaattccttgggattgcaacctaagatggtcaagacctatctcgaggaggagctggacaaatgggccaagatcgcagcgtatggacacgaagtaggaaagaggccctggattaccggtgacgagtccatcgttggattgatgaaggacatcgtgggtgctaatgaaaaggagattgccttgatgaatgctctgaccgttaacttgcatttgctcatgctgtctttcttcaagccaacgcccaaaaggtacaagatcctgctggaggctaaggcgtttccaagtgaccattatgccatagaaagtcagctgcagctgcatggattgaatatagaagaatccatgagaatgatcaaacctagggaaggtgaagagactcttagaatcgaagatatattggaggtgatcgagaaagaaggagactccatcgccgtcatcctgttctccggcgtgcacttctacacaggacagcacttcaacatccctgccatcactaaagcgggccaagctaaaggctgttatgtgggctttgacttggcacacgctgttggtaatgtagagctgtatctccacgactggggcgtggactttgcgtgttggtgtagttacaaatatctcaacgctggagcgggcggtatcgcgggagccttcatccatgagaaacacgcccacaccattaagcctgcacttgtgggatggttcggccacgagctgtcaaccagattcaagatggataataagctccagctgattcccggagtgtgcggatttaggatctcaaatcccccaatccttctggtatgttctctccacgcgtctctggaaatttttaagcaggctaccatgaaagcactcaggaaaaaaagcgtcttgctgactggttacctggaatacttgattaagcacaattacggtaaagataaggccgcaacaaaaaagcctgtggtgaacatcattaccccttcccacgtcgaggagagaggctgtcagttgactatcacgttcagtgtacccaacaaggatgtgtttcaggagctggagaagagaggtgtcgtatgtgataaaaggaatcctaacggcatcagagtggccccagtgcctctttataattctttccacgacgtttacaagttcacgaacttgctgacttccattctggatagtgccgaaaccaaaaat

SEQ ID NO: 31865 - DNA, 1395 bp, synthetic construct
  source 1..1395: mol_type = other DNA; note = Synthetic coding sequence
atggagccgtcctctttggaactgccagccgatacagtgcagaggatcgccgctgaactgaagtgccatcctactgatgagagagtggccctgcatctcgacgaggaagacaaactgcgtcacttccgagaatgcttctatatcccaaagatccaggatctgccccctgtcgaccttagcctggtcaacaaggacgagaacgccatttacttcctaggcaattccctggggctgcagcctaagatggtaaagacctatcttgaagaggaattagacaagtgggccaagatagccgcctacggccatgaagtcggaaagaggccttggattaccggcgacgaaagcattgtggggctgatgaaagatatcgtaggagccaacgagaaagaaatcgctttgatgaacgcactgaccgtaaacctccatttactgatgctctccttcttcaagcccaccccaaaacggtacaagatcctgttggaggccaaggcctttccatctgaccactacgccattgaatcccaactccaacttcatggccttaatattgaggagagtatgagaatgatcaagccaagagaaggtgaggaaacccttcgaattgaggacatactcgaagtcatcgagaaggagggagattctatcgctgtcatcttattcagcggagttcacttctacacagggcaacatttcaatatcccagcaataacgaaggcagggcaggctaaaggctgctacgtcggcttcgatctggcccacgccgtgggcaatgtggaactgtatctccacgactggggagtggatttcgcctgttggtgcagctacaagtacctcaatgcaggagccggcggaatcgcaggggcatttattcacgaaaaacatgcccataccataaaaccagcgctcgtaggctggttcggacatgaactgagcacccgattcaaaatggataacaaacttcaactgataccaggggtatgcggcttccgaatcagcaacccaccaatcttgctcgtgtgttctctgcatgcctctttggaaatttttaagcaagcgacaatgaaggcactcaggaaaaaatcagtcctgctgacgggatacctggaatacctcataaaacacaattacggcaaggataaagctgcaacaaagaagcccgttgtaaacattatcaccccttctcacgtggaagaaaggggctgccaactcacaatcaccttctccgtaccaaataaagacgtgtttcaggagctcgaaaagagaggggttgtgtgtgataagaggaacccgaatggcatccgtgtggcgcctgtacctctgtataactcgttccatgatgtatataaattcaccaatctgctgacatctatcctggactccgccgaaaccaaaaac

SEQ ID NO: 31866 - DNA, 1395 bp, synthetic construct
  source 1..1395: mol_type = other DNA; note = Synthetic coding sequence
atggagccatcgtcgcttgaactgcctgcggacaccgtgcagcggattgccgcagaattgaaatgtcaccctactgacgagagagtcgcccttcatctggatgaagaggataagctgaggcactttcgagagtgcttctatatacccaaaattcaagacctgcccccggtggatctctcgctggtcaataaggacgagaacgccatctatttcttggggaactccctgggcctgcaaccgaagatggtcaagacctacttggaggaagagttggacaagtgggccaagatcgcagcatacggccatgaagtgggaaaacgaccttggattaccggtgatgagagcattgtgggattgatgaaggacatcgtcggcgcgaacgaaaaagagatcgcactcatgaacgcactgacggtcaacctgcacctcctgatgctttcgtttttcaagcctacgcccaagcgctacaaaattcttctggaagctaaggcatttccatcagaccattacgcaatagaatcccagctccagctgcacggtttgaatattgaagaatccatgagaatgatcaagccacgcgaaggagaagagactctgaggattgaagatattctggaagtgattgaaaaagaaggagattcgatagcagtgattctgttcagcggcgtccacttttacactggccaacatttcaacatcccagctattaccaaggcagggcaagcaaagggttgttacgtgggctttgacctggcgcacgctgtcggaaatgtcgagctgtacctgcatgattggggggtcgacttcgcgtgttggtgttcatacaaataccttaacgctggagcaggaggcattgccggagctttcattcatgaaaagcacgcccatactatcaaaccagcacttgtgggctggtttggccacgaactttcgacccgctttaagatggacaacaagctgcaactcatccctggagtgtgtggatttcgcatctccaatcctccaattcttttggtgtgtagcctgcacgcttcgctggagatctttaaacaagcaaccatgaaggcacttcgtaagaagtccgtcctcctcactggttatctggaataccttatcaagcataactacgggaaggataaggcggcgaccaaaaagccagtggttaacattatcactccttcccatgttgaagagcgggggtgccagctgactatcactttcagcgtgcctaacaaggatgttttccaagagctcgaaaaacggggagtcgtctgtgacaagcggaatcctaatggtatcagagtggcaccagtccctttgtacaactcatttcacgatgtctacaagtttactaatctgctgacttcaatactggactcggcagaaaccaagaat

SEQ ID NO: 31867 - DNA, 1395 bp, synthetic construct
  source 1..1395: mol_type = other DNA; note = Synthetic coding sequence
atggagccctccagtcttgaactcccagctgacacagtgcagcggatcgcggcggaattgaaatgccacccaaccgatgagagagttgccctgcacctggacgaggaggataagctccggcatttccgagagtgtttctatatcccaaaaatccaggacttgcctcctgtagacctgagcctagtgaataaggacgaaaacgcaatctacttcctcggcaattccctcgggctccagccaaaaatggtaaagacttacctggaagaagaattagataaatgggccaaaatagccgcttacgggcatgaggtgggcaaaaggccgtggatcaccggggacgagtctatcgtcggattgatgaaagacatcgtgggagctaacgaaaaagaaatcgctctcatgaacgccctgacagtcaaccttcacctcttgatgctctccttcttcaagcccactcctaagcgttacaagattctattggaagcaaaagcgttcccaagcgatcactacgcgattgagtcacagctacagctgcatgggttaaacatcgaagaatccatgaggatgattaagcccagagagggggaagagaccttaagaattgaggacatcctggaagtgatcgagaaagaaggcgactccatcgcggtgatcctcttctcaggggtgcatttctataccggacaacatttcaacattccggcaattactaaggccgggcaggcaaagggctgctacgtgggctttgatcttgctcacgcagtggggaatgtggaactatacctgcacgattggggagtagatttcgcgtgctggtgttcttacaagtatctgaacgccggcgccggcgggatcgctggtgcattcatccatgaaaaacacgcgcacactattaaacccgcactcgtaggatggttcggacatgaactgtccacccggttcaagatggataataagctccagcttatcccaggagtttgcggatttaggatctcaaacccccccatcctcttggtgtgctcccttcacgccagcttggaaatattcaaacaagccactatgaaagcgctgagaaagaagtctgtgctgttgactggctacctcgagtatctgattaaacacaattacggaaaggacaaagcagctaccaaaaagcctgtcgtcaatataatcactccctcacacgtagaagagagaggatgtcagcttacaattaccttctctgttccaaacaaggacgtgtttcaggaactggaaaaacggggagtggtgtgcgacaaaagaaatcctaatgggattagagtagccccagtccctctgtacaactcattccatgacgtatacaaattcactaacctactgacttccattctagattctgcagaaacaaaaaat

SEQ ID NO: 31868 - DNA, 1395 bp, synthetic construct
  source 1..1395: mol_type = other DNA; note = Synthetic coding sequence
atggagccaagtagtcttgaattaccagcagatacagtacaaagaattgctgctgagttgaagtgtcatccaaccgatgaaagagtagcacttcatttagatgaagaagataaacttcgtcatttcagagaatgtttttatattccaaaaatccaagatttgccaccagttgacttatcattagtaaacaaggatgaaaatgctatttattttttaggaaatagtttaggtttacaaccaaagatggttaaaacatatttagaagaagaattagataaatgggcaaaaattgccgcttatggacatgaagttggtaaaagaccatggattacaggagatgaatcaatagttggacttatgaaagatattgtaggtgcaaatgaaaaagaaatcgctcttatgaatgcattaacagttaaccttcacttgttaatgttaagtttttttaagccaacaccaaaaagatataagatcttattagaggcaaaggcatttccatcagatcattacgctattgaatctcaacttcaattgcatggattaaatattgaagagagtatgagaatgattaaaccacgagaaggagaagaaactttaaggattgaggatatacttgaagtcattgaaaaagaaggagattcaatagcagttattttattttctggagttcatttttatacgggtcaacattttaatattccagcaataacaaaggctggacaagcaaaaggatgttatgttggatttgatttagcacatgctgttgggaatgttgaattatatcttcatgattggggagtagattttgcatgttggtgttcatataagtatttaaatgctggagcaggaggaattgcaggtgcttttattcatgaaaaacatgcacatactattaaaccagcactagtaggttggttcggacatgagcttagtactcgatttaagatggacaataagctacaattaattccaggagtttgtggatttcgaatctctaatcctcctattcttttagtttgcagtttacatgcttcgcttgaaatttttaaacaagctacaatgaaagcattaagaaaaaaatcagtattattaactggttatcttgaatatttaataaaacataattatggaaaagataaagctgcaacaaaaaaaccagtagtcaatattataacaccaagtcatgtagaagaaagaggatgtcaattaaccattacatttagtgtacctaataaagatgtctttcaagaattagaaaaaagaggagttgtatgtgataagcgtaatccaaatggaattagagttgctccagtaccactttataattcgtttcatgatgtatataagttcacaaaccttttaacttctattttagattcagccgaaacaaaaaat

SEQ ID NO: 31869 - DNA, 1395 bp, synthetic construct
  source 1..1395: mol_type = other DNA; note = Synthetic coding sequence
atggagccatcttcgctagagctccccgcggacaccgtgcaacgcatcgccgcggagctgaaatgccaccctacagacgagagagtcgcgttgcatctggatgaggaagataaactcagacacttcagggagtgcttctatatacctaagatccaggatcttccccccgtcgatctcagcttggtgaacaaggacgaaaatgccatttacttcctgggaaattccttagggttgcagccaaagatggtgaaaacgtacctggaggaagagctcgataagtgggccaaaattgcagcttatggccacgaggtgggaaagcggccatggatcaccggcgacgagtcaatcgtcggcttaatgaaggatatcgtaggggcaaacgaaaaggagatcgcactgatgaacgctctcaccgtgaacttacatttgttaatgctgtctttctttaagccaaccccaaaacggtataagattctgttggaagccaaagcattcccatcagaccactatgctatagagagtcagctacagctccatgggcttaacatagaggagtcaatgagaatgataaagcctcgagagggcgaggaaactcttcgcatagaggatatactggaggtgatcgagaaggaaggtgactcaattgctgtgatactgtttagcggcgttcatttctacaccggccagcatttcaatatcccagcaatcacaaaggccggacaggcgaagggatgctacgtgggttttgatctggcccacgccgtcgggaacgtggaactgtatttgcacgactggggggtagattttgcctgctggtgttcctacaaatacctaaacgccggagccgggggaatcgctggggctttcattcatgagaagcacgcacacaccatcaagccagcgctggtcggctggtttggccatgagctgtcaacaagattcaagatggacaacaaactccagttaattcccggtgtctgtggctttagaatctcaaaccctcctatcctactggtttgtagcctgcacgctagcctagaaattttcaagcaggctacaatgaaggccctgcggaaaaagagcgtgctgctgaccggctatctcgaatatctgataaagcataattacggaaaagacaaagcagccacaaagaagcctgtggttaatataattactccctctcacgtagaagagaggggctgccagcttactatcaccttctcggtgcccaataaggacgtttttcaggaattggagaagcgtggggtagtttgcgacaagaggaatccaaatggaattcgtgtggcacctgtccccctctacaacagcttccacgacgtgtataagttcaccaatctcctgaccagtatcttggattctgcagaaacaaagaac

SEQ ID NO: 31870 - DNA, 1395 bp, synthetic construct
  source 1..1395: mol_type = other DNA; note = Synthetic coding sequence
atggaaccaagtagtctcgagttgccagcagacaccgttcagcggattgccgctgagcttaagtgtcatcctacagacgaacgcgtcgcccttcacctggatgaggaagacaaactccgacacttcagggagtgtttttatattcccaagatccaggatctgccacccgtggatctgagccttgttaataaggacgaaaatgctatttatttcctgggtaattccctcggtcttcaacccaaaatggtgaaaacctacctggaggaagagctcgataagtgggcaaaaatcgcggcctacggacacgaagtgggcaaaagaccctggattacaggggacgagagtatagtgggcctgatgaaagacatcgtcggagcaaacgagaaagaaatcgctctgatgaacgctctgaccgttaatctgcatctgcttatgctgtctttctttaagcctacgcctaaacgctacaaaatattgctcgaggcgaaagcgtttccgagcgaccattatgctatcgagtcccagctgcagctgcatggtctcaacatagaggagtctatgcgcatgatcaaacctcgggaaggtgaggaaaccctgaggattgaagacatactcgaggtgatagagaaagaaggcgactccatagcagtgatcctgttcagcggcgtgcatttttacaccggccaacatttcaatatccccgccattaccaaggcagggcaggctaaaggatgctacgtggggttcgatcttgctcacgctgtggggaatgtcgaactgtacctccacgattggggcgtcgactttgcctgctggtgttcctacaagtatctgaacgcaggtgctggcgggatagccggtgcttttatccatgagaaacacgcccacacaataaagcccgcacttgtgggatggtttggtcacgaactgtcaaccaggtttaagatggacaacaaactgcaattgattcctggagtctgcggcttccgaatctctaatcctccaattttgctggtgtgttctctccacgcatccctggagatcttcaagcaggctactatgaaggcccttaggaaaaaatcagtactcctgacaggctacctggagtacctcatcaagcacaattacggcaaggacaaagcagccactaagaaacccgtcgtgaacattataactccgagtcacgtggaggaacggggatgtcagcttactatcacattctcagtacccaataaagatgttttccaggagctcgagaagaggggtgtggtttgtgataaaagaaacccaaacggaattagagtggcaccggtgcccttgtacaacagtttccatgacgtatacaagtttaccaaccttctgaccagcatccttgactctgctgagactaaaaat

SEQ ID NO: 31871 - DNA, 1395 bp, synthetic construct
  source 1..1395: mol_type = other DNA; note = Synthetic coding sequence
atggagccaagctcattggaattgcctgctgacacggtgcaacgcatcgccgccgagctgaagtgccacccgaccgatgagcgggtggccctccacctggatgaagaagataagttgagacatttccgggagtgtttttacattccaaagatccaagatctgccaccagtggatctctcgctggtgaacaaggatgaaaatgcaatctactttctgggaaactcgctcggacttcagcctaagatggtcaagacctaccttgaagaagagctcgataagtgggctaagattgcagcttacggacatgaagtgggcaaaagaccgtggattactggagacgaatccatcgtgggcctgatgaaagatatcgtgggagcaaatgaaaaggagattgcacttatgaacgcacttaccgtcaatcttcatctcctgatgctcagctttttcaaacctactccaaagcggtacaaaattcttcttgaagcgaaggcattcccttcggatcattacgccatcgaatcgcagctgcagcttcacggactgaacatcgaagaatcaatgcggatgattaagccccgggagggtgaagaaaccctgcgaatcgaggacatcctcgaagtcattgaaaaagaaggcgatagcattgcggtcatacttttcagcggagtgcatttctacaccggacagcactttaacattcccgcaattactaaggctggacaagccaaggggtgttatgtgggatttgatcttgcgcacgcagtgggcaacgtggagctgtacctgcacgattggggagtggattttgcttgctggtgttcgtacaaatacctgaatgccggtgcaggaggtattgccggagcatttatccatgaaaaacatgctcataccatcaagccggcactggtgggctggttcggacatgaattgtcaaccagattcaagatggacaacaaactccagctgataccgggtgtgtgtggctttagaatttccaaccctccgatacttctggtgtgttcgcttcatgcatccctggaaatctttaagcaggccactatgaaagctctccggaagaagagcgtcctcctgaccgggtaccttgagtacctgattaaacacaactacggaaaggacaaggccgcaaccaaaaagcctgtggtcaacattatcaccccctcacacgtggaagagaggggttgtcagctcaccattactttttctgtcccgaacaaagacgtgttccaggaacttgaaaagcgaggtgttgtgtgtgacaaacgtaatccaaatggtattagagtggcaccagtgcccctgtacaatagcttccatgatgtttacaagtttactaatctgctgacttcgattcttgacagcgccgaaaccaaaaac

SEQ ID NO: 31872 - DNA, 1395 bp, synthetic construct
  source 1..1395: mol_type = other DNA; note = Synthetic coding sequence
atggagccctccagtctcgagcttcctgcggatactgtgcagaggattgcggccgaactgaaatgtcatcctactgacgaacgagtcgccctacacttggatgaagaagacaaactccgccattttagagagtgtttctatatcccaaagatccaggacctgcctcctgtggacctgagtctagttaataaggacgagaacgccatctattttttaggaaactctttagggttgcagcctaaaatggtaaagacctacctcgaggaagaactggacaaatgggctaagatcgcggcctatggacacgaagtaggcaagaggccatggattactggagatgagtcgatcgtagggttaatgaaggatatcgttggcgcaaacgagaaagagatcgccctgatgaatgccctgacagtgaacctgcaccttctcatgttaagcttcttcaagcccacgcctaaacggtacaaaattctcttggaagctaaggcatttcccagcgaccactatgccatagaaagtcagctgcagttacacggtttgaatatcgaggaatcaatgcggatgatcaagcctcgggagggagaggagacccttcgcatcgaggacatcttggaggttatcgaaaaagagggggattccattgctgtaattctgtttagtggcgtgcacttctatacagggcagcacttcaatattcctgcgattaccaaggccggtcaggcgaagggttgctacgtggggtttgaccttgcgcatgctgtgggcaacgtggagctatatcttcacgactggggcgtggactttgcatgctggtgcagttataagtaccttaacgccggggcagggggcattgcaggagcttttatccacgagaagcacgcccatacgataaaacccgccctagtaggctggttcgggcacgaacttagtacaagatttaagatggataacaagctgcagctgatcccaggcgtgtgtgggttcagaataagcaaccctcccatcctgctggtatgctccctgcacgcctccctagagatcttcaaacaggccacaatgaaagcactgcggaaaaaatctgtgttgctcactggatacctagaatacctcattaagcacaattatgggaaagacaaggctgccactaagaaacctgtagtaaacatcatcaccccaagccacgttgaagagagaggctgtcagctgactattactttttctgtcccaaacaaggatgtttttcaggaattggagaagaggggggtggtgtgtgacaagagaaatccgaatgggattcgcgtggctcccgtgccactctacaatagttttcacgacgtgtacaaattcactaacctcctgacaagcatacttgattctgccgagaccaagaac

SEQ ID NO: 31873 - DNA, 1395 bp, synthetic construct
  source 1..1395: mol_type = other DNA; note = Synthetic coding sequence
atggagccaagctccctggaactgccagccgacactgtccagcggatcgctgcggagcttaaatgccacccgaccgacgaaagggtcgcactgcacctggacgaggaagataaactccgccatttccgggagtgcttttacatccccaaaatccaggaccttccacctgtggacctgtccctggtcaataaggacgaaaacgccatttactttctgggaaattccttgggactgcaaccgaagatggtcaaaacctacctggaggaagagctggataagtgggccaagatcgccgcctacggtcatgaggtcggaaagcgcccgtggatcaccggagatgagagcatcgtcggactgatgaaagacatcgtgggagcaaatgaaaaggagatagcacttatgaatgccctcactgtgaacctgcaccttcttatgctctcctttttcaagccgactcctaagcggtacaagatccttctcgaagcgaaagccttcccaagcgaccattacgcgatcgaatcgcaactgcagctgcacggcctgaacatcgaggaatcgatgcgcatgatcaagccacgcgaaggcgaagaaactctccgaatcgaagatatcctcgaagtgatcgagaaggagggagacagcatcgctgtgatcctgttcagcggcgtgcacttctataccggccagcactttaacatcccagccattactaaagccggtcaagctaaaggatgctacgtcggctttgacctggcccacgccgttggcaacgtggagctctacctgcacgactggggcgtggacttcgcatgctggtgttcctacaaatacttgaacgcgggagccggcggcatcgccggcgccttcatccacgaaaagcacgcccacaccatcaagccagctctggtgggatggtttggacatgagttgtcaactcgcttcaaaatggacaacaaactccagctcatccctggagtttgtggttttcgcatctcaaatccgccgatccttctcgtgtgctccctgcatgcgtcgctcgaaatcttcaaacaggccactatgaaggccctcagaaagaaaagcgtgttgctcaccggctacctggagtacctgattaagcacaattacggaaaggataaggcggcgaccaagaaacctgtggtgaacatcatcactccgtcccacgtcgaggaaagaggatgccagctgactatcaccttctccgtgcccaacaaggacgtctttcaggaactggagaagcggggagtcgtctgcgataagcgcaatccgaacggaatccgggtggcgcccgtgccactgtacaatagctttcacgatgtgtacaagtttactaatctccttacctccattcttgacagcgcagagacgaagaac

SEQ ID NO: 31874 - DNA, 1395 bp, synthetic construct
  source 1..1395: mol_type = other DNA; note = Synthetic coding sequence
atggagccaagttcgctggagctaccagcagatacagtgcaaaggatcgctgccgagttaaagtgtcatcccacagacgagcgggtggcccttcacctggacgaggaagataaactacgtcatttccgggagtgtttttatatccctaaaatccaagacctaccccccgtggatcttagtttggtgaataaggacgagaatgctatttattttctggggaactctttgggactccagcctaaaatggtgaagacatacctagaagaggaattggataagtgggctaagattgcagcttatggtcacgaggtgggaaagagaccttggattacaggggatgaaagcatagttggcctcatgaaggacattgttggcgccaacgaaaaggagatcgctctcatgaatgctttaacggtgaacctccatctgcttatgctgagcttcttcaagccgacccccaaacggtacaaaattctgctggaggccaaagctttccctagcgaccactacgctattgaatcacagctgcagctgcatggattgaacattgaagaaagtatgagaatgattaaacctagggaaggcgaggagaccctcagaatagaggatattctggaggttatcgagaaagagggagactcaatagccgtaatcctgttctcgggggtacacttctataccggccaacattttaacatccctgctatcaccaaagctggtcaggccaaaggctgctatgtgggattcgacttagcccatgccgtggggaacgtggaactctacttgcacgactggggggtggacttcgcgtgttggtgcagttataaatatcttaacgcaggggcgggcggaatcgccggcgcattcatccatgagaagcacgctcataccatcaaaccggccttggtgggatggttcgggcacgaactgtcgaccaggttcaaaatggataacaaactgcagctcattcctggcgtgtgcggatttcgcatctccaatccaccgatcctcttggtgtgtagcctgcatgcatctctggagatcttcaaacaggccacgatgaaagctctgcggaagaagtcagtgctcctaacgggctatctggagtaccttatcaagcacaactatggcaaagacaaggctgccactaaaaaaccggtcgtcaacatcataacgccctctcatgtggaggagcgggggtgccagttaactatcaccttctccgtccctaataaggacgtcttccaggaactggaaaagaggggtgttgtctgtgataagaggaatcccaatggaattcgagttgcgcccgtccccctgtacaatagtttccatgatgtgtataagtttacaaacctgctgacgtcaatactggacagtgccgagaccaaaaac

SEQ ID NO: 31875 - DNA, 1395 bp, synthetic construct
  source 1..1395: mol_type = other DNA; note = Synthetic coding sequence
atggagcccagctctctggagctcccagcagatacagtgcagaggatagctgccgaactgaagtgccacccaactgacgagcgagtggctctccacctggatgaggaggacaagctgagacactttcgggaatgcttctatatccccaagatacaggacctcccccctgttgacctgagcctagtaaataaagacgagaatgcaatctacttcctcgggaactcccttggcctgcagcccaaaatggtaaaaacttacctcgaggaagagctcgacaagtgggcaaagatcgccgcatacggacacgaagtgggcaagcgcccctggatcacgggcgacgaatctatcgtggggcttatgaaggacatagtgggcgcgaatgagaaggaaattgctctcatgaatgctctgacggtgaatctgcatctcttgatgctctccttctttaaacccaccccaaagcgctacaagatattgctggaagccaaagcctttccctcagatcactatgcaatcgaaagtcagctgcagttacacgggctgaatatcgaggaatcgatgcgaatgattaagcctagggagggggaagagacgctccgcatcgaagacattctggaagtcattgagaaggagggagattctatcgccgtgatccttttctctggcgttcacttttatacaggccagcatttcaatattccggccatcacgaaggccggacaggctaagggctgttacgtcggcttcgatctcgctcatgcagttgggaacgtcgagctgtatctacacgactggggagtagatttcgcctgttggtgctcctacaagtatctgaacgcaggtgcgggcggtatcgccggcgcatttattcacgagaaacacgctcacaccattaagcctgctctcgtaggctggttcggtcacgaactctctacaaggttcaagatggataacaagctgcagcttattccaggagtgtgtggcttccgcatttctaacccacctattctgcttgtatgctcccttcacgcctccttggagatttttaagcaagccactatgaaggctctgcgtaaaaaatctgtgctgcttaccgggtacctggaatacctgataaagcacaactatggaaaagacaaagccgccactaagaagcctgtggttaacatcatcaccccttctcatgtggaggagagaggatgccagctgacaataacctttagtgtacccaacaaggacgtcttccaggaattagagaaacgtggagtcgtgtgcgataagaggaaccctaacggtatccgggtagcacctgttcctttgtataattccttccatgacgtgtacaagttcactaacctgcttacatccatactggattcggccgagacaaagaat

SEQ ID NO: 31876 - DNA, 1395 bp, synthetic construct
  source 1..1395: mol_type = other DNA; note = Synthetic coding sequence
atggaaccgtccagcctcgaactgcctgcagacaccgtgcaacggatcgcagccgagttgaagtgtcatcctaccgacgaacgggtggcactgcacctggacgaggaagataagctgcgccactttcgcgagtgtttctacattcctaagattcaagatctgccaccggttgatctgtcgctggtcaataaggacgaaaacgcaatttactttctgggaaactccctgggcctccagcctaagatggtcaagacgtaccttgaggaagagctcgacaaatgggccaagattgccgcatacggtcatgaagtcggaaaacgcccttggattaccggtgatgaatcaattgtgggactcatgaaggatatagtgggagcgaatgagaaggaaatcgccctgatgaacgcactgaccgtcaaccttcatcttctgatgctctcctttttcaagccaactcccaagagatataagattttgctggaggcaaaagcattcccatccgaccactacgccattgaatcccaactgcagcttcacggcttgaatatcgaagagtcgatgagaatgattaagccccgggaaggggaggaaaccttgagaatcgaggatattctcgaagtgattgaaaaggaaggagattccattgcagtgatcctgttttccggagtccatttctacactgggcaacatttcaatattcctgccattactaaggccggccaggcaaagggatgttacgtcggtttcgatcttgcgcacgcagtgggaaacgtggagctctacctccacgactggggcgtggatttcgcttgctggtgttcgtacaagtacctgaatgcaggagcaggcggaatagccggcgcctttatccacgaaaagcacgcccatactatcaaacccgcgctggtcggatggtttgggcatgaactttccactagatttaagatggacaataaactgcagcttattcctggggtgtgtggtttcagaatctctaaccccccaatattgctggtctgttcgctccatgcttccctcgagatattcaaacaagcaaccatgaaagcacttcgaaagaagtccgtccttctgacgggatacctggaatacctgataaagcacaattacggaaaagataaagcagcaaccaaaaagcctgtcgtgaacatcatcactccttcccacgtggaagaacggggatgccagcttaccatcactttttcagtccctaataaggacgtctttcaagaactcgagaagagaggggttgtttgtgacaagaggaaccctaatggaatcagagtggcacctgtgcccttgtacaacagttttcatgatgtgtacaagtttaccaatcttctgacttcgattcttgacagcgcagaaacgaagaat

SEQ ID NO: 31877 - DNA, 1395 bp, synthetic construct
  source 1..1395: mol_type = other DNA; note = Synthetic coding sequence
atggaaccgtcgtcgctagaactaccggcggatacggtacaacgaatagcggcggaattaaaatgtcatccgacggatgaacgtgtagcgttacatctagatgaagaagataaactacgacattttcgtgaatgtttttatataccgaaaatacaagatttaccgccggttgatctatcgttagtaaataaagatgaaaatgcgatatattttttaggtaattcgttaggtctacaaccgaaaatggtaaaaacgtatttagaagaagaactagataaatgggcgaaaatagcggcgtatggtcatgaagtaggtaaacgtccgtggataacgggtgatgaatcgatagttggtttaatgaaagatatagttggtgcgaatgaaaaagaaatagcgctaatgaatgcgttaacggtaaatctacatctattaatgttatcgttttttaaaccgacgccgaaacgatataaaatactactagaagcgaaagcgtttccgtcggatcattatgcgatagaatcgcaactacaattacatggtttaaatatagaagaatcgatgcgaatgataaaaccgcgtgaaggtgaagaaacgttacgtatagaagatatactagaagtaatagaaaaagaaggtgattcgatagcggtaatactattttcgggtgtacatttttatacgggtcaacattttaatataccggcgataacgaaagcgggtcaagcgaaaggttgttatgtaggttttgatctagcgcatgcggtaggtaatgtagaactatatttacatgattggggtgttgattttgcgtgttggtgttcgtataaatatttaaatgcgggtgcgggtggtatagcgggtgcgtttatacatgaaaaacatgcgcatacgataaaaccggcgttagttggttggtttggtcatgaactatcgacgcgatttaaaatggataataaactacaactaataccgggtgtttgtggttttcgaatatcgaatccgccgatattattagtttgttcgttacatgcgtcgttagaaatatttaaacaagcgacgatgaaagcgttacgtaaaaaatcggtactactaacgggttatttagaatatttaataaaacataattatggtaaagataaagcggcgacgaaaaaaccggtagtaaatataataacgccgtcgcatgttgaagaacgtggttgtcaattaacgataacgttttcggtaccgaataaagatgtatttcaagaactagaaaaacgtggtgttgtttgtgataaacgaaatccgaatggtatacgtgttgcgccggtaccgttatataattcgtttcatgatgtatataaatttacgaatctattaacgtcgatactagattcggcggaaacgaaaaat

SEQ ID NO: 31878 - DNA, 1395 bp, synthetic construct
  source 1..1395: mol_type = other DNA; note = Synthetic coding sequence
atggaaccgagttccctcgagcttccagcagacacagtccagagaatcgctgcggagcttaaatgccaccccactgatgaacgggtggcgctgcatttggatgaggaagataagttgcggcacttccgcgaatgcttctacattcctaaaattcaggatctaccacccgtcgacctctcactggtgaataaggacgaaaacgcaatatattttctaggtaactcgctcggtcttcagcctaagatggttaaaacctatcttgaagaggaactagataaatgggctaagatcgccgcatacggtcacgaggttggtaaacgaccttggattacgggcgacgagtccattgtggggctgatgaaagacatcgtgggggcgaatgagaaggagatcgcattgatgaacgctcttaccgtgaacttgcacctgctaatgctgtcgttctttaagccgacccctaagcgatataagatcctgctggaagccaaagccttcccatccgaccactacgctatcgagtcgcagctccagctacatggactcaatattgaggagtcaatgagaatgatcaaaccacgggagggagaggagactctccgcattgaggatattctcgaagtgatcgagaaagaaggggacagcattgccgtaatactcttctccggggtgcacttctacacaggccagcatttcaacatcccggcaatcacgaaggccggccaggcaaaaggatgctatgtgggctttgacctggcccatgctgtgggcaatgtggagctgtatctccacgactggggcgtggatttcgcatgctggtgctcttataaatatctgaacgccggagctggtgggattgcgggcgctttcatccacgaaaagcacgctcacaccatcaagcctgccctcgtcggctggttcgggcacgagctgagtacgcggttcaaaatggataacaaactgcagctaattcccggcgtgtgcggtttccggattagtaaccccccaattctgttggtgtgcagtctacacgctagcctcgaaatatttaaacaggctacaatgaaagccctacgaaagaagtctgtgctgttaaccggctacctagagtacctgattaagcataattatggtaaggacaaagccgctacaaaaaagcctgtagtcaacataattactcctagtcatgtggaagagagggggtgtcaactgacaatcacattttccgtacctaataaagacgttttccaggaactggagaaacgcggtgtggtctgtgataaacggaatcccaatggaatcagagtggcccctgttcccctgtacaactcattccatgatgtgtacaagttcacaaatttattgacatccatcctagattccgccgaaaccaagaat

SEQ ID NO: 31879 - DNA, 1395 bp, synthetic construct
  source 1..1395: mol_type = other DNA; note = Synthetic coding sequence
atggagccgagttctcttgagctcccagccgacacagttcagcgtattgccgctgaacttaagtgccaccccacggatgagagggtggcccttcatctggatgaagaagacaagttgaggcacttccgcgaatgcttttacattccaaagattcaggatctccctcccgtggacttgagtttagtgaacaaggatgagaatgccatatacttccttggaaatagcctcggcttacagccaaagatggtcaaaacctacctggaggaggagctggacaagtgggcaaaaatcgccgcctacggccatgaggttggaaaaaggccgtggatcaccggagacgagagcattgtcggccttatgaaagacatcgttggcgccaacgaaaaagagatcgctttgatgaatgctctgacagtgaatctgcacctcctgatgctatctttttttaagcctactcctaagcggtacaaaatactgcttgaggccaaggcctttccctcagatcactatgcgattgagagccagttacaattgcatggactgaacatcgaggagagcatgcggatgatcaagccacgggagggtgaggaaacgttgagaattgaggatatcttagaggttatcgagaaggagggggactcgattgccgtcatccttttctcaggggtacacttctacacaggtcagcattttaatataccggccataaccaaggccggtcaggcaaaggggtgctacgttggtttcgacctagcccacgccgtcggcaacgtggagctctacctgcacgattggggcgtagactttgcatgctggtgtagctacaagtacttaaacgcaggtgccgggggcattgccggcgccttcatccatgaaaaacacgcccacaccatcaagccagctttagttggctggtttggtcatgagcttagtaccagatttaagatggacaacaaattacagcttataccaggagtgtgtggttttcgaatttctaatcctcccatactccttgtttgcagcctgcacgccagcctggagattttcaagcaggccaccatgaaagccctgcgaaagaagtcagtgttgctgactggttacctggagtacctgatcaagcataattatggaaaagataaggccgcaaccaagaaaccagtggttaatattataacgccctcccacgtcgaggaacgcggctgccagctcacaattactttttcggtgcccaacaaggacgtgttccaggagctggagaaaagaggtgtcgtgtgcgacaagcgcaacccaaatggaatccgcgtggcccccgttcccctctacaactcctttcacgatgtgtacaaattcacaaacctgctaacaagtattttggactcagctgagaccaagaat

SEQ ID NO: 31880 - DNA, 1395 bp, synthetic construct
  source 1..1395: mol_type = other DNA; note = Synthetic coding sequence
atggagccttcatcgcttgaactgcccgctgatactgtccaacgcatagccgctgagctgaagtgtcaccccactgacgagcgcgtggccctgcacctggatgaggaggataagttgcgacacttccgcgagtgcttctacatccccaagatccaagacctgccgccggtcgacctctcgcttgtcaataaggacgagaacgcaatttacttcctaggcaactctctgggactgcagccgaagatggtgaaaacgtacctcgaagaagagctggacaagtgggccaagatcgccgcctacggacatgaggtcggtaagcgcccctggatcactggtgacgaaagcattgtggggctcatgaaggatattgtaggagccaacgagaaggagatcgccctcatgaacgccctcaccgttaacctgcatttgctgatgctgagcttcttcaagcccaccccaaagcggtacaaaatcttattggaagctaaggcctttccctctgatcactacgctatcgagtctcagttgcagctgcacggcttgaacatcgaagagtccatgaggatgataaagccccgtgagggtgaggagacccttcgcattgaggacatcctggaggtcatcgagaaagaaggtgactccattgcggtcatattgttctctggtgtccatttctacacgggtcagcacttcaacatccccgcaatcaccaaggctggccaggctaaaggatgctatgtgggcttcgaccttgcgcatgccgtgggtaatgtggagctctatctgcacgattggggcgtcgacttcgcctgctggtgttcttacaagtatctcaacgctggtgccggcggaattgcgggtgcgttcattcacgagaagcatgcgcacactatcaagccggccctggtgggatggttcggccacgagttgagcacgcgcttcaagatggataacaaactccagttgataccgggcgtgtgtggcttccgcatctcgaacccccccattctcctcgtctgtagtctccacgcctcgctcgagatcttcaaacaagccactatgaaggcccttcgcaagaagtctgtgctgttgaccggttacctcgaatacctcatcaaacacaactacggaaaggacaaagccgccacgaagaaacccgtggtgaacataattaccccctctcatgtggaggagcgcggctgccagttgaccatcactttctccgtgcccaataaggacgttttccaagagctagagaagaggggagtagtatgcgataaacgtaatccgaacggaattcgcgttgcacccgttccgttgtacaacagcttccacgacgtctacaagttcaccaatcttttgaccagcatcctggattccgccgagaccaagaac

SEQ ID NO: 31881 - DNA, 1395 bp, synthetic construct
  source 1..1395: mol_type = other DNA; note = Synthetic coding sequence
atggagcccagcagcctggaactgcccgcagacacagtacagcggatcgccgccgagcttaagtgccatcctacagacgaacgcgtcgccctacatctagatgaggaagacaagcttaggcactttagggaatgcttctatatcccaaagattcaggatttacctcctgttgatctctccctcgtgaacaaggatgagaacgctatctacttcctcgggaactcccttggcctccagcctaagatggtgaagacttatctcgaagaagaacttgacaagtgggcaaagatcgccgcttatggacacgaagtcgggaagaggccttggatcacaggggacgagagtatagtcggcctgatgaaggatatcgttggagccaacgagaaggaaattgcacttatgaatgctctcactgtgaatttgcacttacttatgctttctttttttaaaccaactccaaaacggtacaagatcctactcgaggcgaaggctttcccgtcagaccattacgctattgagagccaactgcagctgcacggtctgaacattgaggaaagtatgagaatgatcaagcccagagagggggaagagactctgagaatcgaggacatcctggaggttatagagaaggaaggagattctatcgcagtgatcctttttagcggcgtacacttctacaccggccaacacttcaatattcctgcaattactaaggctggtcaggccaagggatgttacgttggatttgacctggcacacgctgtcgggaatgtagagctctaccttcatgactggggggttgactttgcttgctggtgctcctataaatatctcaatgccggtgctggcggcatagccggtgccttcatccacgagaaacatgcccacacgataaagccggccctcgttgggtggttcggccacgagcttagcaccaggttcaagatggacaataagctgcaactcatcccaggtgtgtgtggctttaggatcagtaacccgcctatcctgctggtgtgtagcctgcatgcaagcttggaaattttcaagcaggctacaatgaaagcccttcggaagaagagcgtccttcttaccgggtacctggaatatttgatcaaacataattatggaaaggacaaggctgctaccaaaaagcccgtagtgaatatcatcacacccagccatgtggaggagcgaggatgccagctcacaattacgttctcagttcccaacaaagacgtttttcaggagctagagaagagaggtgtcgtgtgcgataagaggaacccaaacggcatcagggtcgcacctgtacctttgtacaactcttttcacgatgtctataagttcacaaacttactgacctccatcctagactccgctgaaacgaaaaac

SEQ ID NO: 31882 - DNA, 1395 bp, synthetic construct
  source 1..1395: mol_type = other DNA; note = Synthetic coding sequence
atggagccttcgtcgctggagcttcctgctgacaccgtccaaagaatcgccgctgaactgaagtgtcatccgacggatgaaagagtggccctccatctcgatgaagaagataagttgcgccacttcagggaatgtttctacattcctaagatccaggatctgccccccgtggatctctctcttgtgaataaggatgagaacgctatctactttctgggcaactccctcggacttcagccgaaaatggtcaagacctatttggaggaagagctggacaagtgggcaaagattgcagcatacggccatgaagtgggaaaaagaccgtggattacgggtgatgagtccattgtgggccttatgaaagacatcgtgggtgccaatgagaaggagattgcgcttatgaatgccctgaccgtgaatctgcacttgctgatgctgtcatttttcaagcctactcctaaacgctacaaaattcttcttgaggcaaaggcgtttccctcagaccattacgcaatagaaagccaactccaactgcacggactgaacattgaggagtcaatgagaatgatcaagcctagggagggcgaagaaactcttcggatagaagatattcttgaagtcattgaaaaagaaggcgatagcattgccgtcattctgttctcgggggtgcatttctacactggtcaacatttcaacattcctgcaataacgaaagctggacaagcaaagggttgttacgtggggtttgatttggctcatgcagtgggtaatgtggaattgtatcttcacgattggggagtcgatttcgcgtgttggtgttcctacaagtatctgaacgctggagctggaggcatcgccggtgcctttatacatgagaaacacgcacatactataaagccagcacttgttggctggtttggtcacgaactttctactcgttttaagatggacaataagctgcagttgatcccaggagtctgcggttttagaatcagcaacccaccaattttgctcgtgtgctcgctgcacgcctcgctggagatcttcaagcaggcaactatgaaggcactccgcaagaagtccgtgctgttgaccggatacctggaatacctgattaaacataactacgggaaagacaaggcagcgaccaagaagccagtggttaacattatcactcccagccatgtcgaagaacggggatgtcaattgaccattaccttttcggtgcccaacaaggacgtgttccaggaacttgagaagcggggggtggtgtgcgacaaaaggaatccaaacggtatacgagtcgcaccagtgcccctttacaactcgtttcatgacgtgtacaagtttaccaaccttcttacctccatcctggattctgcggaaaccaagaac

SEQ ID NO: 31883 - DNA, 1395 bp, synthetic construct
  source 1..1395: mol_type = other DNA; note = Synthetic coding sequence
atggagccttcctcgctcgaactccctgcagacaccgtccaaaggattgcagcggaactcaagtgccaccctaccgacgaaagagtggcacttcatctcgatgaagaggataagctgaggcacttcagagagtgcttctatatccctaagattcaagatctccctcccgtggatttgtctttggtcaataaggatgaaaatgcaatttactttttggggaacagcctgggccttcagcccaagatggtcaagacgtaccttgaagaagaattggataaatgggccaagattgcagcctacgggcatgaagtgggtaagcgtccatggatcaccggagacgaaagcatcgtgggacttatgaaggacatagtgggagctaacgagaaggagattgcccttatgaacgccctcaccgtgaacctgcacctccttatgctttcctttttcaagccaactcccaagaggtataagatccttctggaagcaaaggcgttccccagcgaccactacgccatcgagtcgcaacttcaacttcatggactgaacatcgaggagtcaatgcgcatgattaagccaagggagggagaagaaaccctcagaattgaggatatactggaagtgattgagaaggagggagatagcattgctgtgattcttttttcaggggtccacttttacaccggtcaacactttaacattcccgcgattacgaaggcaggacaagccaagggttgctacgtggggttcgacctggcccatgcagtgggtaacgtcgagctgtaccttcacgattggggggtcgatttcgcatgttggtgttcatacaagtacttgaacgcaggtgccggaggaatagccggtgcctttatccatgaaaagcatgcacacactatcaaacctgcacttgtggggtggtttggacatgagctgagcactagatttaagatggataacaagctccagcttataccaggcgtctgtggattcagaatttcgaacccgcccattctccttgtttgttccttgcatgcttccctcgaaatctttaagcaggcaactatgaaagccctgcgtaagaagagcgtgctgctgaccggttacctggaatacttgatcaaacacaattacggaaaagacaaggccgcaacgaagaaaccagtcgtgaatatcataaccccgtcgcacgtggaggagcgcggatgtcagctcactattaccttttccgtccctaacaaagacgtttttcaggagctggaaaagcgtggagtcgtgtgtgacaaacggaaccctaacggtattagagtcgccccagttcctctctacaactcctttcatgacgtgtacaagtttaccaacctgctcaccagcattttggattcggcagaaactaagaac

SEQ ID NO: 31884 - DNA, 1395 bp, synthetic construct
  source 1..1395: mol_type = other DNA; note = Synthetic coding sequence
atggaaccgtcgtctctggaacttccggccgacactgtccagaggatcgccgccgagctgaagtgccacccaaccgacgagcgcgtggccctgcatcttgacgaggaggacaagctgaggcatttcagggaatgcttctacatccctaagatccaagaccttccgcctgtggatctttccttggtgaataaagacgaaaacgcgatctacttcctggggaatagcctgggactgcagcccaaaatggtaaagacctacctggaagaagaattggacaaatgggcgaagattgcagcgtacgggcatgaagtgggcaagaggccttggatcaccggggacgaaagcattgttggcctgatgaaggatatcgtgggggcgaatgagaaagagatcgcactgatgaatgctttgaccgtcaacctgcatctgctgatgctctccttcttcaagccgaccccaaaacggtacaaaatcctgctggaggctaaggcgttcccgtccgatcactacgccatcgaatcccaattgcagctccacgggttgaacatcgaggagagcatgcggatgatcaagccgcgcgagggtgaggaaaccctgcgcatcgaggacatcctggaggtgatcgaaaaggaaggagattcgatcgccgtgatcctcttctcaggagtgcatttctacaccggacagcacttcaacatcccagccatcaccaaggctggtcaagcaaaaggctgctacgtgggattcgatcttgcgcatgcagtcggcaacgtggaactgtacctgcatgattggggcgtggattttgcgtgctggtgctcctacaagtacttgaacgccggcgcgggtggaatcgccggagcgttcatacacgaaaaacacgcacatactatcaaaccggctctggtgggatggttcggacacgagctctcgacccgtttcaagatggataacaagctgcagctgattccgggagtgtgcggttttcgcatcagcaaccctcctatcctcctggtctgttctctccatgcgtcgttggaaatcttcaaacaggccaccatgaaggctctgcggaagaaatcagtgctgctgactggatatttggagtacctgatcaagcacaattacggtaaagacaaggccgccaccaagaagccggtggtcaatatcatcaccccgtcacatgtggaggaaagaggatgccagctgactatcaccttctcagtcccaaacaaagatgtgttccaagaactcgagaagcggggagtcgtctgcgataagcgcaatccgaacggaatccgcgtggccccggtcccactctacaattcgttccatgacgtctataagttcaccaacctgctgacttccattttggactccgctgagactaagaat

SEQ ID NO: 31885 - DNA, 1395 bp, synthetic construct
  source 1..1395: mol_type = other DNA; note = Synthetic coding sequence
atggagccatcttcactcgagctccctgctgacaccgtgcagcggatcgcagcggagttgaagtgtcatcccaccgacgagcgggtagccctgcatctagacgaggaagataagctccgtcactttcgggagtgtttctacattcctaaaatacaagacctgccaccggtagatctgtctttggtgaataaagatgagaatgccatctacttcctgggcaattctctcggactgcagcccaaaatggtgaagacttacttggaagaggagctggacaagtgggctaagattgccgcatatggccacgaggtcggcaaacgaccctggataacaggggatgagagcatcgtgggattgatgaaggatatcgtaggtgccaacgagaaagaaatcgctctgatgaacgctctcacagtgaatctgcatctgttgatgctgtcgtttttcaaacccacgcccaaacgctacaaaattctattggaggctaaggcattccctagcgaccattacgccattgaatcgcaactccagctgcacggactgaacatagaagagagtatgagaatgatcaagccaagggagggcgaagaaacgctgagaatcgaggatatactggaagtcattgagaaagagggggatagcattgccgtgattctgtttagcggtgtacacttttataccggccagcactttaacatccctgccattactaaagctgggcaggcgaaggggtgttacgtcggcttcgatcttgctcatgccgttgggaacgtggagctctatctccacgactggggcgttgattttgcttgttggtgttcttacaagtatctgaatgccggagcaggaggaatagccggggcctttattcacgagaagcatgcccataccatcaagccagcccttgtgggctggtttggccatgagctgagcacacggtttaaaatggacaacaaactccaactcattcccggggtatgcggattccgcataagtaatccaccgattctgctcgtatgcagtctgcatgcatctctggagatttttaagcaggcaaccatgaaggccctccggaagaaaagcgtcctcttaacaggatatctcgagtacttgatcaaacataactatgggaaagacaaggctgccactaagaaaccagtggtgaacataatcacgcccagtcacgtcgaggagcgcggttgccaactgactatcacattctcagttcctaataaagatgtgttccaggaactggaaaagcggggggtcgtatgcgataagaggaaccccaacggcatccgggtggcaccagtgcccctctataatagcttccatgatgtctataagttcacaaacctgcttacgagcattctcgattcagctgaaactaaaaac

SEQ ID NO: 31886 - DNA, 1395 bp, synthetic construct; identical to SEQ ID NO: 31885
  source 1..1395: mol_type = other DNA; note = Synthetic coding sequence

SEQ ID NO: 31887 - DNA, 1395 bp, synthetic construct
  source 1..1395: mol_type = other DNA; note = Synthetic coding sequence
atggaaccatcgtcgctcgaactgccagcagataccgtgcagaggatagcagcagaactcaaatgtcacccaactgacgaaagagtcgcactccacctggatgaagaggataaactgcggcatttcagagagtgtttctacattcctaaaatccaagacctgccgcctgttgatttgagcctggtcaataaggatgaaaatgcaatctattttcttggaaactcccttggcctgcaaccgaagatggtcaaaacttatttggaagaggagttggataagtgggctaagattgcagcatacggtcatgaggttggaaagcgaccctggattaccggcgacgagtcaattgttggactcatgaaggatattgttggtgccaacgaaaaggagattgcccttatgaacgcacttactgtgaacctgcacctgcttatgctttcctttttcaagccaacgcctaagagatacaagatcctgcttgaggcgaaggcattcccttccgatcactacgccatcgaatcgcagctgcaattgcacggccttaacatagaggaatcaatgcgaatgataaaacctcgggaaggtgaggaaactcttagaattgaagatattctggaagtcatcgaaaaagaaggagacagcattgccgtgattctcttctccggagtccacttctataccggacaacactttaacattcccgcaattaccaaggccggccaagcaaaaggctgttacgtgggattcgatctggcacatgccgtgggtaacgttgaactgtaccttcatgattggggggtggactttgcatgctggtgctcctacaagtaccttaatgcgggcgcaggagggatcgcaggggctttcatccatgagaagcacgctcataccataaaacccgcgcttgtgggttggttcggtcatgaactctccaccagatttaagatggacaacaagctgcagctgatacctggagtgtgcggattcaggatctcaaaccccccgattctcctggtctgctcgttgcatgcatcattggagatctttaaacaagcgacgatgaaggcgctgagaaagaagtcagtgttgctcaccggttacctggaatacctgataaaacataactacgggaaggacaaggccgcaaccaagaagccagtcgtgaatatcattacgccatcacatgtggaagaacgcggttgccagcttactatcactttctcggtgcctaataaggacgtgtttcaggaactggaaaaacgaggagtggtgtgtgataaaagaaacccaaatggaatccgtgtggcgcccgtccctctgtacaactcgtttcacgacgtgtacaaattcaccaatcttctgacctcgattcttgatagcgccgagactaaaaac

SEQ ID NO: 31888 - DNA, 1395 bp, synthetic construct
  source 1..1395: mol_type = other DNA; note = Synthetic coding sequence
atggaaccttcgtcccttgagctgcccgcagataccgtgcaacgaattgcagcagagctgaagtgccatcctactgacgaacgtgtggcattgcacctggacgaagaagataaactgagacatttcagagaatgtttttacattccaaagatccaggatctgccacctgtcgatctttccctcgtgaataaggatgaaaatgcaatttacttccttggtaactcgcttggcctccagcctaaaatggtgaaaacctacctggaggaggaactggataagtgggctaagatagccgcatatggacacgaggtcggtaaacgtccatggataactggtgatgaatcaattgtcggcctcatgaaagacattgtgggtgcaaacgaaaaagagattgcactgatgaatgcccttactgtcaacctgcatcttcttatgctcagcttctttaagcctacgcctaagagatacaaaattctgctggaagcaaaggcttttccctccgaccactacgcaatcgagtcccaactgcaactgcatggtctgaacattgaggagtcgatgaggatgatcaagccgagagagggtgaagagacgcttcggatcgaagatattctggaagtgatcgagaaagaaggtgattcgatcgcggttatactgttttccggcgtgcacttctataccgggcaacacttcaatatccccgcgattaccaaggcaggtcaggcaaaagggtgctacgtgggctttgaccttgcacacgcagtgggtaatgtggagctgtacctccacgactggggtgttgacttcgcatgttggtgcagctacaagtaccttaatgcaggagccgggggaatcgctggagcatttatccatgagaagcatgcgcataccattaagccggcacttgtgggatggtttggacacgaactctcaacccgttttaagatggacaataaacttcaactgatcccaggcgtctgtggatttagaatttctaacccacccattctgctcgtgtgcagccttcatgcatcgcttgagatctttaagcaagcaactatgaaggcactgcgcaaaaagtcagtgcttctgaccggatatctggaatacctcattaagcacaactacggtaaggacaaagcagccactaagaagccggttgtgaacatcataacgccgtcccacgtggaagaacgaggttgtcagctgactatcacgttttcggttcctaacaaggatgtctttcaagaacttgaaaagcgtggggtggtatgtgataagcggaatccgaacgggattcgggtggcccctgtgccactctacaatagtttccatgacgtctacaaattcactaacctcctgacttcgattctcgactcggcagaaaccaaaaac

SEQ ID NO: 31889 - DNA, 1395 bp, synthetic construct
  source 1..1395: mol_type = other DNA; note = Synthetic coding sequence
atggaacccagttctttggagttgccagccgacaccgtgcagcgtatagctgccgagctcaaatgccacccaaccgatgaaagggtggcactgcatttggatgaggaagataagctgcgtcatttccgtgagtgcttttatattccaaagatccaggatctccctccagtggaccttagcttggtaaacaaggacgagaatgctatctactttctgggtaattcactgggattgcagccaaagatggtgaagacataccttgaggaggaattggacaagtgggccaagatagctgcctacggtcacgaggtgggtaagcgtccatggatcactggtgatgagtctatcgtaggcttgatgaaggatatcgtcggcgccaacgagaaggagattgctctgatgaatgctctcaccgtaaaccttcaccttctgatgctgtctttcttcaaacctacaccaaagcgctataaaatcttgttggaagccaaggccttcccaagtgaccattacgcaatcgaaagccagttgcaattgcacggtttgaacatagaggagtccatgaggatgataaagcctagggaaggcgaagagacactgcgcatcgaggacatccttgaggttatcgagaaggagggcgatagcatcgctgtcatattgttctctggtgtacacttttataccggtcaacactttaatatccctgcaatcactaaagccggccaggctaagggctgttacgtgggattcgatcttgcccacgctgtaggcaatgttgagctgtatcttcacgactggggcgtggactttgcttgctggtgttcttataagtacctgaacgctggtgctggcggaatcgctggagctttcatccatgaaaagcacgcacacacaatcaagcccgctctggttggatggttcggtcacgagctttccactcgttttaaaatggacaacaaactgcagcttattcccggtgtgtgtggctttcgtatctctaacccccccattttgctggtgtgtagtctgcacgcctctctggagattttcaagcaagcaaccatgaaggcacttcgtaagaagtctgtactcctgacaggatacctggaatatctgataaagcacaactatggcaaggataaggccgccactaagaaacctgttgtgaacatcatcacaccttcacatgtagaggagagaggctgccagcttactattaccttttccgtgccaaacaaggacgtcttccaggagcttgagaagcgtggagtggtttgtgataagaggaaccccaacggtatcagagtggctcctgtgcctctgtacaacagcttccacgacgtctacaaattcacaaatctcctcacatcaattctggacagcgcagagaccaagaac

SEQ ID NO: 31890 - DNA, 1395 bp, synthetic construct
  source 1..1395: mol_type = other DNA; note = Synthetic coding sequence
atggagccttcttcgctggaactcccagcagatactgtccagcggattgccgcagagcttaagtgtcaccccaccgatgaacgggtggcactccatctggacgaggaagacaagctacgccactttagagagtgcttctatattccaaagatccaggacctcccacctgttgatctctccctcgttaacaaagatgagaatgccatttacttcctcggaaacagcctgggactgcagcctaaaatggtaaagacctacctggaagaggagctagataagtgggctaaaatcgctgcctatgggcacgaagttggcaagaggccctggatcaccggggatgaatccatagtcggtttgatgaaagacatagtgggcgccaatgaaaaagaaatcgccctgatgaacgccctgaccgttaaccttcacctcctgatgctcagcttctttaaacccaccccgaaaaggtataagatcctcttggaagctaaagcgtttccctcagaccattatgccatcgagtctcagcttcaactacacggactgaacatagaagagtctatgcgtatgattaagcctagagaaggcgaggaaacgctgcggattgaggacatccttgaagtgatagagaaggaaggtgactcgatcgccgtcattctcttcagcggagtacatttttacactgggcagcacttcaatattcccgctataaccaaagccggccaggctaaaggatgctatgtggggttcgatctggcccacgcagttggaaatgtcgaactgtatttgcacgactggggcgtggactttgcatgctggtgcagctacaaatatctgaatgccggcgcgggagggattgcaggggcgttcattcatgaaaagcacgcccacactatcaagcccgcgttggttgggtggtttggacacgaactgagtacacggtttaaaatggacaacaagctgcagctgattcccggggtctgcggctttaggatcagtaacccacctatcttgcttgtgtgtagcctacatgcgtctctggagatcttcaaacaggctactatgaaggcattgcggaaaaagtcggtcctgctcactgggtacctcgagtatctgattaagcataactacgggaaggacaaggccgccaccaagaaacccgttgtgaatattatcaccccatcccacgtggaggagaggggctgccaactgaccatcacatttagcgtgccaaataaggacgtgtttcaggagctggagaagcggggtgtggtctgcgataaacgcaatccgaacggaatccgggtggcgccagtgccactatataattctttccacgacgtgtataaattcactaacctactgacatctatactggactccgctgagacaaagaac

SEQ ID NO: 31891 - DNA, 1395 bp, synthetic construct
  source 1..1395: mol_type = other DNA; note = Synthetic coding sequence
atggagccgtctagtcttgagctgccggccgacaccgttcagcgtatcgccgctgagttgaaatgccaccctactgacgagagagtggctctccacctggacgaagaagataagctccggcattttagagagtgcttttacatccccaaaatccaagacctccctccagtagacctgtccctcgtgaacaaagatgaaaacgcaatctatttcctaggaaactcattaggtttgcaacccaagatggtgaaaacctatctggaggaagagctcgataaatgggccaaaatcgcagcttacggccatgaggtggggaaaagaccttggatcacgggagatgagtccatagtgggcctgatgaaggacatagtgggagccaacgagaaggaaatagccctgatgaatgcgttgaccgtgaacctacacttgctaatgctatccttcttcaagcccaccccaaagaggtacaaaattctactcgaggccaaggcctttccgtccgaccattacgccattgagtcccagcttcagctccatggcctgaatatcgaggaatcaatgaggatgatcaaacctcgggagggtgaggaaaccctgcggatagaggatatactggaagtcatagagaaggaaggagactccattgcggtaatcctgttctcaggcgtgcatttttataccggccagcatttcaatatccctgcaatcacaaaagccgggcaagccaaaggctgctacgttggcttcgatctggcccacgccgtggggaacgttgagctctatctccacgattggggtgtggattttgcttgttggtgtagctacaaatacttgaatgcaggtgctggcggaatcgcaggcgccttcatacacgaaaagcacgcccataccatcaagcccgcacttgtcggatggttcggccacgaactgtctactaggtttaaaatggacaataaactgcagttaatccccggggtttgtggattccggattagtaatcccccgattcttctggtgtgttcactgcatgcttcactcgagatttttaagcaggccacaatgaaggcactgcgaaagaaaagtgtcttactcacaggctacctggagtatctgattaagcacaactatgggaaggacaaggcagctacaaaaaagccagttgtgaacatcatcacaccctcacatgtggaggaaagaggatgccagctcacaattacctttagcgttccgaataaggacgtgtttcaggaactggagaagcgcggcgtcgtgtgtgataaacggaacccgaatggcatccgggtcgcaccagtccctctctacaattcgtttcacgacgtatataagttcactaacctgttgacttcgatcttagacagcgcagagactaagaat

SEQ ID NO: 31892 - DNA, 1395 bp, synthetic construct
  source 1..1395: mol_type = other DNA; note = Synthetic coding sequence
atggaaccctctagtttggaactcccagcagacactgtacagaggattgctgcggaactgaagtgtcaccctacggacgaacgggtcgccctccatttggatgaagaggacaagttgcggcatttccgcgaatgcttctacatccccaaaattcaagatcttcctccagtcgacctttcactggtgaacaaagatgagaacgccatttactttctcggcaacagtttggggctgcaaccaaaaatggttaagacatatctggaagaggagctggataagtgggccaagatcgctgcttacggtcacgaagtcggtaaaagaccctggatcacaggcgacgaaagcatcgtgggcctgatgaaggacatagtgggcgcgaatgaaaaggaaatcgccttgatgaatgcactgactgtgaacctgcatctgctcatgctgtctttctttaagcccacaccgaaaagatacaagattctgttggaagctaaggcatttccaagcgaccattatgcgattgaaagccagctgcaactccatggattgaacatagaggaatctatgaggatgattaagcctagggagggcgaggagacactgagaattgaggatatcctcgaggtgatagaaaaggaaggggactccatcgcagtgatacttttctccggggtgcatttctatacagggcagcatttcaacatccccgcgatcaccaaggctgggcaggcaaagggatgctatgtggggttcgatctggcgcacgcagtgggcaatgtagaactgtacctccacgactggggggtggatttcgcatgctggtgctcttacaaatacctcaatgcaggcgctggagggattgctggggcttttatccatgagaagcacgcgcataccataaagcctgcgctggtgggttggtttgggcacgaactgtctacacggtttaagatggacaacaagctccagttgattccaggggtttgtgggttcagaatctccaatccaccaatcttgctggtatgcagcctgcatgcctctttggagattttcaagcaggccactatgaaggctctgcgcaagaagtccgtgcttcttactgggtacctggaatatctcattaaacataattatggtaaagataaggcggccactaagaaacccgtggtcaatattatcaccccttctcacgtagaagagcggggctgtcagctcacaatcacctttagcgtgcctaataaagacgtcttccaggagctcgaaaagcgaggtgtcgtctgtgacaagcgcaatccaaacggtatcagagtcgcaccagtgccattgtacaactcttttcacgacgtttataaatttacaaacttgctgacaagcatcctggatagcgccgagactaagaat

SEQ ID NO: 31893-31896 - skipped (4 entries)

SEQ ID NO: 31897 - protein, 6 aa, Homo sapiens
LVPRGS

SEQ ID NO: 31898 - protein, 4 aa, Homo sapiens
LVPR

SEQ ID NO: 31899 - skipped

SEQ ID NO: 31900 - protein, 4 aa, Homo sapiens
IEGR

SEQ ID NO: 31901 - protein, 4 aa, Homo sapiens
IDGR

SEQ ID NO: 31902 - protein, 4 aa, Homo sapiens
AEGR

SEQ ID NO: 31903 - skipped

SEQ ID NO: 31904 - DNA, 615 bp, Homo sapiens
  source 1..615: mol_type = genomic DNA
atggctggacctgccacccagagccccatgaagctgatggccctgcagctgctgctgtggcacagtgcactctggacagtgcaggaagccacccccctgggccctgccagctccctgccccagagcttcctgctcaagtgcttagagcaagtgaggaagatccagggcgatggcgcagcgctccaggagaagctgtgtgccacctacaagctgtgccaccccgaggagctggtgctgctcggacactctctgggcatcccctgggctcccctgagcagctgccccagccaggccctgcagctggcaggctgcttgagccaactccatagcggccttttcctctaccaggggctcctgcaggccctggaagggatctcccccgagttgggtcccaccttggacacactgcagctggacgtcgccgactttgccaccaccatctggcagcagatggaagaactgggaatggcccctgccctgcagcccacccagggtgccatgccggccttcgcctctgctttccagcgccgggcaggaggggtcctggttgcctcccatctgcagagcttcctggaggtgtcgtaccgcgttctacgccaccttgcccagccctga

SEQ ID NO: 31905 - DNA, 800 bp, synthetic construct
  source 1..800: mol_type = other DNA; note = Synthetic transcript sequence
taatacgactcactatagggaaataagagagaaaagaagagtaagaagaaatataagagccaccatggctggacctgccacccagagccccatgaagctgatggccctgcagctgctgctgtggcacagtgcactctggacagtgcaggaagccacccccctgggccctgccagctccctgccccagagcttcctgctcaagtgcttagagcaagtgaggaagatccagggcgatggcgcagcgctccaggagaagctgtgtgccacctacaagctgtgccaccccgaggagctggtgctgctcggacactctctgggcatcccctgggctcccctgagcagctgccccagccaggccctgcagctggcaggctgcttgagccaactccatagcggccttttcctctaccaggggctcctgcaggccctggaagggatctcccccgagttgggtcccaccttggacacactgcagctggacgtcgccgactttgccaccaccatctggcagcagatggaagaactgggaatggcccctgccctgcagcccacccagggtgccatgccggccttcgcctctgctttccagcgccgggcaggaggggtcctggttgcctcccatctgcagagcttcctggaggtgtcgtaccgcgttctacgccaccttgcccagccctgaagcgctgccttctgcggggcttgccttctggccatgcccttcttctctcccttgcacctgtacctcttggtctttgaataaagcctgagtaggaaggcggccgctcgagcatgcatctaga

SEQ ID NO: 31906 - DNA, 800 bp, synthetic construct
  source 1..800: mol_type = other DNA; note = Synthetic transcript sequence
taatacgactcactatagggaaataagagagaaaagaagagtaagaagaaatataagagccaccatggccggtcccgcgacccaaagccccatgaaacttatggccctgcagttgctgctttggcactcggccctctggacagtccaagaagcgactcctctcggacctgcctcatcgttgccgcagtcattccttttgaagtgtctggagcaggtgcgaaagattcagggcgatggagccgcactccaagagaagctctgcgcgacatacaaactttgccatcccgaggagctcgtactgctcgggcacagcttggggattccctgggctcctctctcgtcctgtccgtcgcaggctttgcagttggcagggtgcctttcccagctccactccggtttgttcttgtatcagggactgctgcaagcccttgagggaatctcgccagaattgggcccgacgctggacacgttgcagctcgacgtggcggatttcgcaacaaccatctggcagcagatggaggaactggggatggcacccgcgctgcagcccacgcagggggcaatgccggcctttgcgtccgcgtttcagcgcagggcgggtggagtcctcgtagcgagccaccttcaatcatttttggaagtctcgtaccgggtgctgagacatcttgcgcagccgtgaagcgctgccttctgcggggcttgccttctggccatgcccttcttctctcccttgcacctgtacctcttggtctttgaataaagcctgagtaggaaggcggccgctcgagcatgcatctaga

SEQ ID NO: 31907 - RNA, 758 nt, synthetic construct
  source 1..758: mol_type = other RNA; note = Synthetic transcript sequence
gggaaataagagagaaaagaagagtaagaagaaatataagagccaccatggccggtcccgcgacccaaagccccatgaaacttatggccctgcagttgctgctttggcactcggccctctggacagtccaagaagcgactcctctcggacctgcctcatcgttgccgcagtcattccttttgaagtgtctggagcaggtgcgaaagattcagggcgatggagccgcactccaagagaagctctgcgcgacatacaaactttgccatcccgaggagctcgtactgctcgggcacagcttggggattccctgggctcctctctcgtcctgtccgtcgcaggctttgcagttggcagggtgcctttcccagctccactccggtttgttcttgtatcagggactgctgcaagcccttgagggaatctcgccagaattgggcccgacgctggacacgttgcagctcgacgtggcggatttcgcaacaaccatctggcagcagatggaggaactggggatggcacccgcgctgcagcccacgcagggggcaatgccggcctttgcgtccgcgtttcagcgcagggcgggtggagtcctcgtagcgagccaccttcaatcatttttggaagtctcgtaccgggtgctgagacatcttgcgcagccgtgaagcgctgccttctgcggggcttgccttctggccatgcccttcttctctcccttgcacctgtacctcttggtctttgaataaagcctgagtaggaag

SEQ ID NO: 31908 - RNA, 854 nt, synthetic construct
  source 1..854: mol_type = other RNA; note = Synthetic transcript sequence
gggaaataagagagaaaagaagagtaagaagaaatataagagccaccatggtatccaagggggaggaggacaacatggcgatcatcaaggagttcatgcgattcaaggtgcacatggaaggttcggtcaacggacacgaatttgaaatcgaaggagagggtgaaggaaggccctatgaagggacacagaccgcgaaactcaaggtcacgaaagggggaccacttcctttcgcctgggacattctttcgccccagtttatgtacgggtccaaagcatatgtgaagcatcccgccgatattcctgactatctgaaactcagctttcccgagggattcaagtgggagcgggtcatgaactttgaggacgggggtgtagtcaccgtaacccaagactcaagcctccaagacggcgagttcatctacaaggtcaaactgcgggggactaactttccgtcggatgggccggtgatgcagaagaaaacgatgggatgggaagcgtcatcggagaggatgtacccagaagatggtgcattgaagggggagatcaagcagagactgaagttgaaagatgggggacattatgatgccgaggtgaaaacgacatacaaagcgaaaaagccggtgcagcttcccggagcgtataatgtgaatatcaagttggatattacttcacacaatgaggactacacaattgtcgaacagtacgaacgcgctgagggtagacactcgacgggaggcatggacgagttgtacaaatgataagctgccttctgcggggcttgccttctggccatgcccttcttctctcccttgcacctgtacctcttggtctttgaataaagcctgagtaggaag

SEQ ID NO: 31909 - DNA, 896 bp, synthetic construct
  source 1..896: mol_type = other DNA; note = Synthetic transcript sequence
taatacgactcactatagggaaataagagagaaaagaagagtaagaagaaatataagagccaccatggtatccaagggggaggaggacaacatggcgatcatcaaggagttcatgcgattcaaggtgcacatggaaggttcggtcaacggacacgaatttgaaatcgaaggagagggtgaaggaaggccctatgaagggacacagaccgcgaaactcaaggtcacgaaagggggaccacttcctttcgcctgggacattctttcgccccagtttatgtacgggtccaaagcatatgtgaagcatcccgccgatattcctgactatctgaaactcagctttcccgagggattcaagtgggagcgggtcatgaactttgaggacgggggtgtagtcaccgtaacccaagactcaagcctccaagacggcgagttcatctacaaggtcaaactgcgggggactaactttccgtcggatgggccggtgatgcagaagaaaacgatgggatgggaagcgtcatcggagaggatgtacccagaagatggtgcattgaagggggagatcaagcagagactgaagttgaaagatgggggacattatgatgccgaggtgaaaacgacatacaaagcgaaaaagccggtgcagcttcccggagcgtataatgtgaatatcaagttggatattacttcacacaatgaggactacacaattgtcgaacagtacgaacgcgctgagggtagacactcgacgggaggcatggacgagttgtacaaatgataagctgccttctgcggggcttgccttctggccatgcccttcttctctcccttgcacctgtacctcttggtctttgaataaagcctgagtaggaaggcggccgctcgagcatgcatctaga

SEQ ID NO: 31910 - RNA, 725 nt, synthetic construct
  source 1..725: mol_type = other RNA; note = Synthetic transcript sequence
gggaaataagagagaaaagaagagtaagaagaaatataagagccaccatgggagtgcacgagtgtcccgcgtggttgtggttgctgctgtcgctcttgagcctcccactgggactgcctgtgctgggggcaccacccagattgatctgcgactcacgggtacttgagaggtaccttcttgaagccaaagaagccgaaaacatcacaaccggatgcgccgagcactgctccctcaatgagaacattactgtaccggatacaaaggtcaatttctatgcatggaagagaatggaagtaggacagcaggccgtcgaagtgtggcaggggctcgcgcttttgtcggaggcggtgttgcggggtcaggccctcctcgtcaactcatcacagccgtgggagcccctccaacttcatgtcgataaagcggtgtcggggctccgcagcttgacgacgttgcttcgggctctgggcgcacaaaaggaggctatttcgccgcctgacgcggcctccgcggcacccctccgaacgatcaccgcggacacgtttaggaagctttttagagtgtacagcaatttcctccgcggaaagctgaaattgtatactggtgaagcgtgtaggacaggggatcgctgataagctgccttctgcggggcttgccttctggccatgcccttcttctctcccttgcacctgtacctcttggtctttgaataaagcctgagtaggaag

SEQ ID NO: 31911 - RNA, 1536 nt, synthetic construct
  source 1..1536: mol_type = other RNA; note = Synthetic transcript sequence
gggaaataagagagaaaagaagagtaagaagaaatataagagccaccaatgcagcgcgtcaacatgattatggccgaatcgccgggactcatcacaatctgcctcttgggttatctcttgtcggcagaatgtaccgtgttcttggatcacgaaaacgcgaacaaaattcttaatcgcccgaagcggtataactccgggaaacttgaggagtttgtgcagggcaatcttgaacgagagtgcatggaggagaaatgctcctttgaggaggcgagggaagtgtttgaaaacacagagcgaacaacggagttttggaagcaatacgtagatggggaccagtgtgagtcgaatccgtgcctcaatgggggatcatgtaaagatgacatcaatagctatgaatgctggtgcccgtttgggtttgaagggaagaactgtgagctggatgtgacgtgcaacatcaaaaacggacgctgtgagcagttttgtaagaactcggctgacaataaggtagtatgctcgtgcacagagggataccggctggcggagaaccaaaaatcgtgcgagcccgcagtcccgttcccttgtgggagggtgagcgtgtcacagactagcaagttgacgagagcggagactgtattccccgacgtggactacgtcaacagcaccgaagccgaaacaatcctcgataacatcacgcagagcactcagtccttcaatgactttacgagggtcgtaggtggtgaggacgcgaaacccggtcagttcccctggcaggtggtattgaacggaaaagtcgatgccttttgtggaggttccattgtcaacgagaagtggattgtcacagcggcacactgcgtagaaacaggagtgaaaatcacggtagtggcgggagagcataacattgaagagacagagcacacggaacaaaagcgaaatgtcatcagaatcattccacaccataactataacgcggcaatcaataagtacaatcacgacatcgcacttttggagcttgacgaacctttggtgcttaattcgtacgtcacccctatttgtattgccgacaaagagtatacaaacatcttcttgaaattcggctccgggtacgtatcgggctggggcagagtgttccataagggtagatccgcactggtgttgcaatacctcagggtgcccctcgtggatcgagccacttgtctgcggtccaccaaattcacaatctacaacaatatgttctgtgcgggattccatgaaggtgggagagatagctgccagggagactcagggggtccccacgtgacggaagtcgaggggacgtcatttctgacgggaattatctcatggggagaggaatgtgcgatgaaggggaaatatggcatctacactaaagtgtcacggtatgtcaattggatcaaggaaaagacgaaactcacgtgatcagccagcgctgccttctgcggggcttgccttctggccatgcccttcttctctcccttgcacctgtacctcttggtctttgaataaagcctgagtaggaag

SEQ ID NO: 31912 - DNA, 767 bp, synthetic construct
  source 1..767: mol_type = other DNA; note = Synthetic transcript sequence
taatacgactcactatagggaaataagagagaaaagaagagtaagaagaaatataagagccaccatgggagtgcacgagtgtcccgcgtggttgtggttgctgctgtcgctcttgagcctcccactgggactgcctgtgctgggggcaccacccagattgatctgcgactcacgggtacttgagaggtaccttcttgaagccaaagaagccgaaaacatcacaaccggatgcgccgagcactgctccctcaatgagaacattactgtaccggatacaaaggtcaatttctatgcatggaagagaatggaagtaggacagcaggccgtcgaagtgtggcaggggctcgcgcttttgtcggaggcggtgttgcggggtcaggccctcctcgtcaactcatcacagccgtgggagcccctccaacttcatgtcgataaagcggtgtcggggctccgcagcttgacgacgttgcttcgggctctgggcgcacaaaaggaggctatttcgccgcctgacgcggcctccgcggcacccctccgaacgatcaccgcggacacgtttaggaagctttttagagtgtacagcaatttcctccgcggaaagctgaaattgtatactggtgaagcgtgtaggacaggggatcgctgataagctgccttctgcggggcttgccttctggccatgcccttcttctctcccttgcacctgtacctcttggtctttgaataaagcctgagtaggaaggcggccgctcgagcatgcatctaga

SEQ ID NO: 31913 - DNA, 750 bp, synthetic construct
  source 1..750: mol_type = other DNA; note = Synthetic transcript sequence
taatacgactcactatagggaaataagagagaaaagaagagtaagaagaaatataagagccaccatgggagtgcacgagtgtcccgcgtggttgtggttgctgctgtcgctcttgagcctcccactgggactgcctgtgctgggggcaccacccagattgatctgcgactcacgggtacttgagaggtaccttcttgaagccaaagaagccgaaaacatcacaaccggatgcgccgagcactgctccctcaatgagaacattactgtaccggatacaaaggtcaatttctatgcatggaagagaatggaagtaggacagcaggccgtcgaagtgtggcaggggctcgcgcttttgtcggaggcggtgttgcggggtcaggccctcctcgtcaactcatcacagccgtgggagcccctccaacttcatgtcgataaagcggtgtcggggctccgcagcttgacgacgttgcttcgggctctgggcgcacaaaaggaggctatttcgccgcctgacgcggcctccgcggcacccctccgaacgatcaccgcggacacgtttaggaagctttttagagtgtacagcaatttcctccgcggaaagctgaaattgtatactggtgaagcgtgtaggacaggggatcgctgataagctgccttctgcggggcttgccttctggccatgcccttcttctctcccttgcacctgtacctcttggtctttgaataaagcctgagtaggaaggcggccgc

SEQ ID NO: 31914 - DNA, 1578 bp, synthetic construct
  source 1..1578: mol_type = other DNA; note = Synthetic transcript sequence
taatacgactcactatagggaaataagagagaaaagaagagtaagaagaaatataagagccaccaatgcagcgcgtcaacatgattatggccgaatcgccgggactcatcacaatctgcctcttgggttatctcttgtcggcagaatgtaccgtgttcttggatcacgaaaacgcgaacaaaattcttaatcgcccgaagcggtataactccgggaaacttgaggagtttgtgcagggcaatcttgaacgagagtgcatggaggagaaatgctcctttgaggaggcgagggaagtgtttgaaaacacagagcgaacaacggagttttggaagcaatacgtagatggggaccagtgtgagtcgaatccgtgcctcaatgggggatcatgtaaagatgacatcaatagctatgaatgctggtgcccgtttgggtttgaagggaagaactgtgagctggatgtgacgtgcaacatcaaaaacggacgctgtgagcagttttgtaagaactcggctgacaataaggtagtatgctcgtgcacagagggataccggctggcggagaaccaaaaatcgtgcgagcccgcagtcccgttcccttgtgggagggtgagcgtgtcacagactagcaagttgacgagagcggagactgtattccccgacgtggactacgtcaacagcaccgaagccgaaacaatcctcgataacatcacgcagagcactcagtccttcaatgactttacgagggtcgtaggtggtgaggacgcgaaacccggtcagttcccctggcaggtggtattgaacggaaaagtcgatgccttttgtggaggttccattgtcaacgagaagtggattgtcacagcggcacactgcgtagaaacaggagtgaaaatcacggtagtggcgggagagcataacattgaagagacagagcacacggaacaaaagcgaaatgtcatcagaatcattccacaccataactataacgcggcaatcaataagtacaatcacgacatcgcacttttggagcttgacgaacctttggtgcttaattcgtacgtcacccctatttgtattgccgacaaagagtatacaaacatcttcttgaaattcggctccgggtacgtatcgggctggggcagagtgttccataagggtagatccgcactggtgttgcaatacctcagggtgcccctcgtggatcgagccacttgtctgcggtccaccaaattcacaatctacaacaatatgttctgtgcgggattccatgaaggtgggagagatagctgccagggagactcagggggtccccacgtgacggaagtcgaggggacgtcatttctgacgggaattatctcatggggagaggaatgtgcgatgaaggggaaatatggcatctacactaaagtgtcacggtatgtcaattggatcaaggaaaagacgaaactcacgtgatcagccagcgctgccttctgcggggcttgccttctggccatgcccttcttctctcccttgcacctgtacctcttggtctttgaataaagcctgagtaggaaggcggccgctcgagcatgcatctaga

SEQ ID NO: 31915 - RNA, 851 nt, synthetic construct
  source 1..851: mol_type = other RNA; note = Synthetic transcript sequence
gggaaataagagagaaaagaagagtaagaagaaatataagagccaccatggtgagcaagggcgaggaggataacatggccatcatcaaggagttcatgcgcttcaaggtgcacatggagggctccgtgaacggccacgagttcgagatcgagggcgagggcgagggccgcccctacgagggcacccagaccgccaagctgaaggtgaccaagggtggccccctgcccttcgcctgggacatcctgtcccctcagttcatgtacggctccaaggcctacgtgaagcaccccgccgacatccccgactacttgaagctgtccttccccgagggcttcaagtgggagcgcgtgatgaacttcgaggacggcggcgtggtgaccgtgacccaggactcctccctgcaggacggcgagttcatctacaaggtgaagctgcgcggcaccaacttcccctccgacggccccgtaatgcagaagaagaccatgggctgggaggcctcctccgagcggatgtaccccgaggacggcgccctgaagggcgagatcaagcagaggctgaagctgaaggacggcggccactacgacgctgaggtcaagaccacctacaaggccaagaagcccgtgcagctgcccggcgcctacaacgtcaacatcaagttggacatcacctcccacaacgaggactacaccatcgtggaacagtacgaacgcgccgagggccgccactccaccggcggcatggacgagctgtacaagtgagctgccttctgcggggcttgccttctggccatgcccttcttctctcccttgcacctgtacctcttggtctttgaataaagcctgagtaggaag

SEQ ID NO: 31916 - DNA, 1838 bp, synthetic construct
  source 1..1838: mol_type = other DNA; note = Synthetic transcript sequence
taatacgactcactatagggaaataagagagaaaagaagagtaagaagaaatataagagccaccatggaagatgcgaagaacatcaagaagggacctgccccgttttaccctttggaggacggtacagcaggagaacagctccacaaggcgatgaaacgctacgccctggtccccggaacgattgcgtttaccgatgcacatattgaggtagacatcacatacgcagaatacttcgaaatgtcggtgaggctggcggaagcgatgaagagatatggtcttaacactaatcaccgcatcgtggtgtgttcggagaactcattgcagtttttcatgccggtccttggagcacttttcatcggggtcgcagtcgcgccagcgaacgacatctacaatgagcgggaactcttgaatagcatgggaatctcccagccgacggtcgtgtttgtctccaaaaaggggctgcagaaaatcctcaacgtgcagaagaagctccccattattcaaaagatcatcattatggatagcaagacagattaccaagggttccagtcgatgtatacctttgtgacatcgcatttgccgccagggtttaacgagtatgacttcgtccccgagtcatttgacagagataaaaccatcgcgctgattatgaattcctcgggtagcaccggtttgccaaagggggtggcgttgccccaccgcactgcttgtgtgcggttctcgcacgctagggatcctatctttggtaatcagatcattcccgacacagcaatcctgtccgtggtaccttttcatcacggttttggcatgttcacgactctcggctatttgatttgcggtttcagggtcgtacttatgtatcggttcgaggaagaactgtttttgagatccttgcaagattacaagatccagtcggccctccttgtgccaacgcttttctcattctttgcgaaatcgacacttattgataagtatgacctttccaatctgcatgagattgcctcagggggagcgccgcttagcaaggaagtcggggaggcagtggccaagcgcttccaccttcccggaattcggcagggatacgggctcacggagacaacatccgcgatccttatcacgcccgagggtgacgataagccgggagccgtcggaaaagtggtccccttctttgaagccaaggtcgtagacctcgacacgggaaaaaccctcggagtgaaccagaggggcgagctctgcgtgagagggccgatgatcatgtcaggttacgtgaataaccctgaagcgacgaatgcgctgatcgacaaggatgggtggttgcattcgggagacattgcctattgggatgaggatgagcacttctttatcgtagatcgacttaagagcttgatcaaatacaaaggctatcaggtagcgcctgccgagctcgagtcaatcctgctccagcaccccaacattttcgacgccggagtggccgggttgcccgatgacgacgcgggtgagctgccagcggccgtggtagtcctcgaacatgggaaaacaatgaccgaaaaggagatcgtggactacgtagcatcacaagtgacgactgcgaagaaactgaggggaggggtagtctttgtggacgaggtcccgaaaggcttgactgggaagcttgacgctcgcaaaatccgggaaatcctgattaaggcaaagaaaggcgggaaaatcgctgtctgataagctgccttctgcggggcttgccttctggccatgcccttcttctctcccttgcacctgtacctcttggtctttgaataaagcctgagtaggaaggcggccgctcgagcatgcatctaga

SEQ ID NO: 31917 - RNA, 1796 nt, synthetic construct
  source 1..1796: mol_type = other RNA; note = Synthetic transcript sequence
gggaaataagagagaaaagaagagtaagaagaaatataagagccaccatggaagatgcgaagaacatcaagaagggacctgccccgttttaccctttggaggacggtacagcaggagaacagctccacaaggcgatgaaacgctacgccctggtccccggaacgattgcgtttaccgatgcacatattgaggtagacatcacatacgcagaatacttcgaaatgtcggtgaggctggcggaagcgatgaagagatatggtcttaacactaatcaccgcatcgtggtgtgttcggagaactcattgcagtttttcatgccggtccttggagcacttttcatcggggtcgcagtcgcgccagcgaacgacatctacaatgagcgggaactcttgaatagcatgggaatctcccagccgacggtcgtgtttgtctccaaaaaggggctgcagaaaatcctcaacgtgcagaagaagctccccattattcaaaagatcatcattatggatagcaagacagattaccaagggttccagtcgatgtatacctttgtgacatcgcatttgccgccagggtttaacgagtatgacttcgtccccgagtcatttgacagagataaaaccatcgcgctgattatgaattcctcgggtagcaccggtttgccaaagggggtggcgttgccccaccgcactgcttgtgtgcggttctcgcacgctagggatcctatctttggtaatcagatcattcccgacacagcaatcctgtccgtggtaccttttcatcacggttttggcatgttcacgactctcggctatttgatttgcggtttcagggtcgtacttatgtatcggttcgaggaagaactgtttttgagatccttgcaagattacaagatccagtcggccctccttgtgccaacgcttttctcattctttgcgaaatcgacacttattgataagtatgacctttccaatctgcatgagattgcctcagggggagcgccgcttagcaaggaagtcggggaggcagtggccaagcgcttccaccttcccggaattcggcagggatacgggctcacggagacaacatccgcgatccttatcacgcccgagggtgacgataagccgggagccgtcggaaaagtggtccccttctttgaagccaaggtcgtagacctcgacacgggaaaaaccctcggagtgaaccagaggggcgagctctgcgtgagagggccgatgatcatgtcaggttacgtgaataaccctgaagcgacgaatgcgctgatcgacaaggatgggtggttgcattcgggagacattgcctattgggatgaggatgagcacttctttatcgtagatcgacttaagagcttgatcaaatacaaaggctatcaggtagcgcctgccgagctcgagtcaatcctgctccagcaccccaacattttcgacgccggagtggccgggttgcccgatgacgacgcgggtgagctgccagcggccgtggtagtcctcgaacatgggaaaacaatgaccgaaaaggagatcgtggactacgtagcatcacaagtgacgactgcgaagaaactgaggggaggggtagtctttgtggacgaggtcccgaaaggcttgactgggaagcttgacgctcgcaaaatccgggaaatcctgattaaggcaaagaaaggcgggaaaatcgctgtctgataagctgccttctgcggggcttgccttctggccatgcccttcttctctcccttgcacctgtacctcttggtctttgaataaagcctgagtaggaag

SEQ ID NO: 31918 - DNA, 905 bp, synthetic construct
  source 1..905: mol_type = other DNA; note = Synthetic transcript sequence
taatacgactcactatagggaaataagagagaaaagaagagtaagaagaaatataagagccaccatggtgtccaagggtgaggaattgtttaccggggtggtgcctattctcgtcgaacttgacggggatgtgaatggacacaagttttcggtatccggagaaggagagggtgacgccacatacggaaagcttacactcaaattcatctgtacgacggggaaactgcccgtaccctggcctacgctcgtaaccacgctgacttatggagtgcagtgctttagcagataccccgaccatatgaagcagcacgacttcttcaagtcggcgatgcccgaggggtacgtgcaagagaggaccattttcttcaaagacgatggcaattacaaaacacgcgcagaagtcaagtttgagggcgatactctggtcaatcggatcgaattgaagggaatcgatttcaaagaagatggaaacatccttggccataagctcgagtacaactataactcgcataatgtctatatcatggctgacaagcagaaaaacggtatcaaagtcaactttaagatccgacacaatattgaggacggttcggtgcagcttgcggaccactatcaacagaatacgccgattggggatggtccggtccttttgccggataaccattatctctcaacccagtcagccctgagcaaagatccaaacgagaagagggaccacatggtcttgctcgaattcgtgacagcggcagggatcactctgggaatggacgagttgtacaagtgataagctgccttctgcggggcttgccttctggccatgcccttcttctctcccttgcacctgtacctcttggtctttgaataaagcctgagtaggaaggcggccgctcgagcatgcatctaga

SEQ ID NO: 31919 - RNA, 863 nt, synthetic construct
  source 1..863: mol_type = other RNA; note = Synthetic transcript sequence
gggaaataagagagaaaagaagagtaagaagaaatataagagccaccatggtgtccaagggtgaggaattgtttaccggggtggtgcctattctcgtcgaacttgacggggatgtgaatggacacaagttttcggtatccggagaaggagagggtgacgccacatacggaaagcttacactcaaattcatctgtacgacggggaaactgcccgtaccctggcctacgctcgtaaccacgctgacttatggagtgcagtgctttagcagataccccgaccatatgaagcagcacgacttcttcaagtcggcgatgcccgaggggtacgtgcaagagaggaccattttcttcaaagacgatggcaattacaaaacacgcgcagaagtcaagtttgagggcgatactctggtcaatcggatcgaattgaagggaatcgatttcaaagaagatggaaacatccttggccataagctcgagtacaactataactcgcataatgtctatatcatggctgacaagcagaaaaacggtatcaaagtcaactttaagatccgacacaatattgaggacggttcggtgcagcttgcggaccactatcaacagaatacgccgattggggatggtccggtccttttgccggataaccattatctctcaacccagtcagccctgagcaaagatccaaacgagaagagggaccacatggtcttgctcgaattcgtgacagcggcagggatcactctgggaatggacgagttgtacaagtgataagctgccttctgcggggcttgccttctggccatgcccttcttctctcccttgcacctgtacctcttggtctttgaataaagcctgagtaggaag

SEQ ID NO: 31920 - RNA, 716 nt, synthetic construct
  source 1..716: mol_type = other RNA; note = Synthetic transcript sequence
gggaaataagagagaaaagaagagtaagaagaaatataagagccaccatgaactttctcttgtcatgggtgcactggagccttgcgctgctgctgtatcttcatcacgctaagtggagccaggccgcacccatggcggagggtggcggacagaatcaccacgaagtagtcaaattcatggacgtgtaccagaggtcgtattgccatccgattgaaactcttgtggatatctttcaagaataccccgatgaaatcgagtacattttcaaaccgtcgtgtgtccctctcatgaggtgcgggggatgctgcaatgatgaagggttggagtgtgtccccacggaggagtcgaatatcacaatgcaaatcatgcgcatcaaaccacatcagggtcagcatattggagagatgtcctttctccagcacaacaaatgtgagtgtagaccgaagaaggaccgagcccgacaggaaaacccatgcggaccgtgctccgagcggcgcaaacacttgttcgtacaagacccccagacatgcaagtgctcatgtaagaataccgattcgcggtgtaaggcgagacagctggaattgaacgagcgcacgtgtaggtgcgacaagcctagacggtgagctgccttctgcggggcttgccttctggccatgcccttcttctctcccttgcacctgtacctcttggtctttgaataaagcctgagtaggaag

SEQ ID NO: 31921 - RNA, 1316 nt, synthetic construct
  source 1..1316: mol_type = other RNA; note = Synthetic transcript sequence
gggaaataagagagaaaagaagagtaagaagaaatataagagccaccatgcccccatcgggattgagattgttgccccttctgcttccgctgctttggttgctcgtcctgacccctggcaggcccgcagcggggttgtcgacgtgtaagacgattgacatggagctcgtgaaacgcaagagaattgaagcaatcaggggtcaaattctgagcaaactcagactcgcatccccaccgtcccagggtgaggtcccaccgggacctctgcccgaggcggtcctggccttgtacaactcgacacgcgaccgagtcgcaggggagtcagcggaacccgagcccgaacccgaggccgactactacgccaaagaggtcactcgggtcttgatggtggaaactcacaacgaaatctacgacaagtttaagcagtcgacccattcgatctacatgttcttcaataccagcgagcttagagaagcggtccccgagccggtacttttgtccagagcggagctgcggttgctcaggctcaagctgaaagtggaacagcacgtagagctttatcagaagtacagcaacaattcatggcggtatctctcgaaccggctgttggcgccgtcggattcacccgaatggctcagctttgatgtcacgggggtggtgcgccagtggttgtccaggggcggagagatcgaaggatttcggctctcagcccactgttcgtgtgatagcagggacaacacgctccaagtagatatcaacggattcactactggtcgcagaggggatcttgcgacaatccacggtatgaatcgcccttttctcctgctgatggccacaccccttgaacgggcgcaacatcttcagtcatcccgccataggagagcactggacacgaactactgtttttcgtcgacagagaagaattgctgcgtgcggcagctttacatcgacttccgaaaagatctcgggtggaaatggattcatgaaccgaaggggtatcacgccaacttctgcctgggtccgtgtccttatatctggtcgttggatacacagtattcaaaggtgttggctctttacaatcagcacaacccgggagcctcggctgcgccttgttgcgtaccccaggcattggagccattgccgattgtgtattatgtgggaagaaagccgaaagtggagcagttgtcgaatatgatcgtacggagctgcaaatgctcctgataagctgccttctgcggggcttgccttctggccatgcccttcttctctcccttgcacctgtacctcttggtctttgaataaagcctgagtaggaag

SEQ ID NO: 31922 - RNA, 806 nt, synthetic construct
  source 1..806: mol_type = other RNA; note = Synthetic transcript sequence
gggaaataagagagaaaagaagagtaagaagaaatataagagccaccatgggtgtaaggcacccgccctgctcccacagactcctggcggtgtgtgccttggtatcgcttgcgaccgccgcactgcttgtcaatccgggggtagtcgtgcgcatcagccagaagggactggattacgcctcgcagcagggtaccgcggcacttcagaaagagcttaagcggatcaagattccagactattcagatagctttaagatcaagcatttgggaaaaggtcactattcgttttactcgatggacattagagaattccagctcccttcgtcccaaatttccatggtcccgaatgtggggctgaaattcagcatttcgaacgcgaacatcaagatctcagggaaatggaaggcacagaagcgatttctcaaaatgtcaggaaactttgatctctccatcgaggggatgtcaatctcggcggacttgaaactcggctccaatcctacatcgggaaagcccactattacggcctcgtcgtgttcgagccatatcaactcggtgcacgtccatatctcaaagtccaaagtaggatggcttatccagctcttccacaaaaagattgagtcggctttgcgcaacaagatgaatagccaagtgtgcgagaaagtcacaaattccgtgtcatcagaattgcagccctacttccaaacgctgtaatgagctgccttctgcggggcttgccttctggccatgcccttcttctctcccttgcacctgtacctcttggtctttgaataaagcctgagtaggaag

SEQ ID NO: 31923 - RNA, 1573 nt, synthetic construct
  source 1..1573: mol_type = other RNA; note = Synthetic transcript sequence
gggaaataagagagaaaagaagagtaagaagaaatataagagccaccatggtatccaagggggaggaggacaacatggcgatcatcaaggagttcatgcgattcaaggtgcacatggaaggttcggtcaacggacacgaatttgaaatcgaaggagagggtgaaggaaggccctatgaagggacacagaccgcgaaactcaaggtcacgaaagggggaccacttcctttcgcctgggacattctttcgccccagtttatgtacgggtccaaagcatatgtgaagcatcccgccgatattcctgactatctgaaactcagctttcccgagggattcaagtgggagcgggtcatgaactttgaggacgggggtgtagtcaccgtaacccaagactcaagcctccaagacggcgagttcatctacaaggtcaaactgcgggggactaactttccgtcggatgggccggtgatgcagaagaaaacgatgggatgggaagcgtcatcggagaggatgtacccagaagatggtgcattgaagggggagatcaagcagagactgaagttgaaagatgggggacattatgatgccgaggtgaaaacgacatacaaagcgaaaaagccggtgcagcttcccggagcgtataatgtgaatatcaagttggatattacttcacacaatgaggactacacaattgtcgaacagtacgaacgcgctgagggtagacactcgacgggaggcatggacgagttgtacaaaggaagcggagctactaacttcagcctgctgaagcaggctggagacgtggaggagaaccctggacctatggtgtccaagggtgaggaattgtttaccggggtggtgcctattctcgtcgaacttgacggggatgtgaatggacacaagttttcggtatccggagaaggagagggtgacgccacatacggaaagcttacactcaaattcatctgtacgacggggaaactgcccgtaccctggcctacgctcgtaaccacgctgacttatggagtgcagtgctttagcagataccccgaccatatgaagcagcacgacttcttcaagtcggcgatgcccgaggggtacgtgcaagagaggaccattttcttcaaagacgatggcaattacaaaacacgcgcagaagtcaagtttgagggcgatactctggtcaatcggatcgaattgaagggaatcgatttcaaagaagatggaaacatccttggccataagctcgagtacaactataactcgcataatgtctatatcatggctgacaagcagaaaaacggtatcaaagtcaactttaagatccgacacaatattgaggacggttcggtgcagcttgcggaccactatcaacagaatacgccgattggggatggtccggtccttttgccggataaccattatctctcaacccagtcagccctgagcaaagatccaaacgagaagagggaccacatggtcttgctcgaattcgtgacagcggcagggatcactctgggaatggacgagttgtacaagtgataatggtctttgaataaagcctgagtaggaag

SEQ ID NO: 31924 - RNA, 1568 nt, synthetic construct
  source 1..1568: mol_type = other RNA; note = Synthetic transcript sequence
gggaaataagagagaaaagaagagtaagaagaaatataagagccaccatggccgtgatggcgccgcggaccctggtcctcctgctgtcgggcgccctcgccctgacgcagacctgggccgaggtgcagctggtcgagagcggcgggggcctcgtgcagccgggcgggtcgctgcggctgagctgcgccgcgagcgggttcaacatcaaggacacctacatccactgggtgcgccaggcccccggcaagggcctcgagtgggtcgcccggatctaccccacgaacgggtacacccgctacgccgacagcgtgaagggccggttcaccatcagcgcggacacctcgaagaacacggcctacctgcagatgaacagcctgcgcgccgaggacaccgccgtgtactactgcagccggtggggcggcgacgggttctacgccatggactactgggggcagggcaccctcgtcaccgtgagcagcgcgtcgacgaaggggcccagcgtgttcccgctggcccccagcagcaagagcaccagcggcgggaccgccgccctgggctgcctcgtcaaggactacttccccgagcccgtgaccgtgtcgtggaacagcggcgcgctgacgagcggggtccacaccttcccggccgtgctgcagagcagcggcctctactcgctgagcagcgtggtcaccgtgcccagcagcagcctggggacccagacgtacatctgcaacgtgaaccacaagccctcgaacaccaaggtcgacaagaaggtggagcccaagagctgcgacaagacccacacctgcccgccctgccccgcccccgagctcctgggcgggcccagcgtgttcctgttcccgcccaagcccaaggacacgctcatgatcagccgcacccccgaggtcacctgcgtggtggtcgacgtgagccacgaggaccccgaggtgaagttcaactggtacgtcgacggcgtggaggtgcacaacgccaagaccaagccgcgggaggagcagtacaactcgacgtaccgcgtcgtgagcgtgctgaccgtcctgcaccaggactggctcaacggcaaggagtacaagtgcaaggtgagcaacaaggccctgcccgcgcccatcgagaagaccatcagcaaggccaaggggcagccccgggagccgcaggtgtacaccctgccccccagccgcgacgagctcacgaagaaccaggtcagcctgacctgcctggtgaagggcttctacccctcggacatcgccgtggagtgggagagcaacgggcagccggagaacaactacaagaccaccccgcccgtcctcgacagcgacggcagcttcttcctgtacagcaagctgacggtggacaagtcgcggtggcagcagggcaacgtgttcagctgcagcgtcatgcacgaggccctccacaaccactacacccagaagagcctgagcctgagccccgggtgataataggctgccttctgcggggcttgccttctggccatgcccttcttctctcccttgcacctgtacctcttggtctttgaataaagcctgagtaggaag

SEQ ID NO: 31925 - RNA, 863 nt, synthetic construct
  source 1..863: mol_type = other RNA; note = Synthetic transcript sequence
gggaaataagagagaaaagaagagtaagaagaaatataagagccaccatggccgtgatggcgccgcggaccctggtcctcctgctgtcgggcgccctcgccctgacgcagacctgggccgacatccagatgacccagagcccgtcgagcctgagcgccagcgtgggcgaccgggtcacgatcacctgccgcgcgagccaggacgtgaacaccgccgtggcctggtaccagcagaagcccgggaaggcccccaagctcctgatctactcggcgagcttcctgtacagcggcgtccccagccggttcagcgggtcgcgcagcggcaccgacttcacgctcaccatcagcagcctgcagccggaggacttcgccacctactactgccagcagcactacaccacgccccccaccttcgggcagggcaccaaggtggagatcaagcggaccgtggccgcccccagcgtcttcatcttcccgcccagcgacgagcagctgaagtcgggcacggccagcgtggtgtgcctcctgaacaacttctacccccgcgaggcgaaggtccagtggaaggtggacaacgccctgcagagcgggaacagccaggagagcgtgaccgagcaggactcgaaggacagcacctacagcctcagcagcaccctgacgctgagcaaggccgactacgagaagcacaaggtctacgcctgcgaggtgacccaccaggggctctcgagccccgtgaccaagagcttcaaccggggcgagtgctgataataggctgccttctgcggggcttgccttctggccatgcccttcttctctcccttgcacctgtacctcttggtctttgaataaagcctgagtaggaag
